(19) United States
(12) Patent Application Publication
(10) Pub. No.: US 2003/0054373 A1
(43) Pub. Date: Mar. 20, 2003

(54) Nucleic acids, proteins and antibodies

(75) Inventors: Craig A. Rosen, Laytonsville, MD (US); Steven M. Ruben, Olney, MD (US); Steven C. Barash, Rockville, MD (US)

Correspondence Address: HUMAN GENOME SCIENCES INC, 9410 KEY WEST AVENUE, ROCKVILLE, MD, 20850

(73) Assignee: Human Genome Sciences, Inc., Rockville, MD (US)

(21) Appl. No.: 10/091,572

(22) Filed: Mar. 7, 2002

Related U.S. Application Data
(63) Continuation of application No. 09/764,850, filed on Jan. 17, 2001, now abandoned.
(60) Provisional application No. 60/179,065, filed on Jan. 31, 2000.
(60) Provisional application No. 60/180,628, filed on Feb. 4, 2000.
(60) Provisional application No. 60/214,886, filed on Jun. 28, 2000.
(60) Provisional application No. 60/217,487, filed on Jul. 11, 2000.
(60) Provisional application No. 60/225,758, filed on Aug. 14, 2000.
(60) Provisional application No. 60/220,963, filed on Jul. 26, 2000.
(60) Provisional application No. 60/217,496, filed on Jul. 11, 2000.
(60) Provisional application No. 60/225,447, filed on Aug. 14, 2000.
(60) Provisional application No. 60/218,290, filed on Jul. 14, 2000.
(60) Provisional application No. 60/225,757, filed on Aug. 14, 2000.
(60) Provisional application No. 60/226,868, filed on Aug. 22, 2000.
(60) Provisional application No. 60/216,647, filed on Jul. 7, 2000.
(60) Provisional application No. 60/225,267, filed on Aug. 14, 2000.
(60) Provisional application No. 60/216,880, filed on Jul. 7, 2000.
(60) Provisional application No. 60/225,270, filed on Aug. 14, 2000.
(60) Provisional application No. 60/251,869, filed on Dec. 8, 2000.
(60) Provisional application No. 60/235,834, filed on Sep. 27, 2000.
(60) Provisional application No. 60/234,274, filed on Sep. 21, 2000.
(60) Provisional application No. 60/234,223, filed on Sep. 21, 2000.
(60) Provisional application No. 60/228,924, filed on Aug. 30, 2000.
(60) Provisional application No. 60/224,518, filed on Aug. 14, 2000.
(60) Provisional application No. 60/236,369, filed on Sep. 29, 2000.
(60) Provisional application No. 60/224,519, filed on Aug. 14, 2000.
(60) Provisional application No. 60/220,964, filed on Jul. 26, 2000.
(60) Provisional application No. 60/241,809, filed on Oct. 20, 2000.
(60) Provisional application No. 60/249,299, filed on Nov. 17, 2000.
(60) Provisional application No. 60/236,327, filed on Sep. 29, 2000.
(60) Provisional application No. 60/241,785, filed on Oct. 20, 2000.
(60) Provisional application No. 60/244,617, filed on Nov. 1, 2000.
(60) Provisional application No. 60/225,268, filed on Aug. 14, 2000.
(60) Provisional application No. 60/236,368, filed on Sep. 29, 2000.
(60) Provisional application No. 60/251,856, filed on Dec. 8, 2000.
(60) Provisional application No. 60/251,868, filed on Dec. 8, 2000.
(60) Provisional application No. 60/229,344, filed on Sep. 1, 2000.
(60) Provisional application No. 60/234,997, filed on Sep. 25, 2000.
(60) Provisional application No. 60/229,343, filed on Sep. 1, 2000.
(60) Provisional application No. 60/229,345, filed on Sep. 1, 2000.
(60) Provisional application No. 60/229,287, filed on Sep. 1, 2000.
(60) Provisional application No. 60/229,513, filed on Sep. 5, 2000.
(60) Provisional application No. 60/231,413, filed on Sep. 8, 2000.
(60) Provisional application No. 60/229,509, filed on Sep. 5, 2000.
(60) Provisional application No. 60/236,367, filed on Sep. 29, 2000.
(60) Provisional application No. 60/237,039, filed on Oct. 2, 2000.
(60) Provisional application No. 60/237,038, filed on Oct. 2, 2000.
(60) Provisional application No. 60/236,370, filed on Sep. 29, 2000.
(60) Provisional application No. 60/236,802, filed on Oct. 2, 2000.
(60) Provisional application No. 60/237,037, filed on Oct. 2, 2000.
(60) Provisional application No. 60/237,040, filed on Oct. 2, 2000.
(60) Provisional application No. 60/240,960, filed on Oct. 20, 2000.
(60) Provisional application No. 60/239,935, filed on Oct. 13, 2000.
(60) Provisional application No. 60/239,937, filed on Oct. 13, 2000.
(60) Provisional application No. 60/241,787, filed on Oct. 20, 2000.
(60) Provisional application No. 60/246,474, filed on Nov. 8, 2000.
(60) Provisional application No. 60/246,532, filed on Nov. 8, 2000.
(60) Provisional application No. 60/249,216, filed on Nov. 17, 2000.
(60) Provisional application No. 60/249,210, filed on Nov. 17, 2000.
(60) Provisional application No. 60/226,681, filed on Aug. 22, 2000.
(60) Provisional application No. 60/225,759, filed on Aug. 14, 2000.
(60) Provisional application No. 60/225,213, filed on Aug. 14, 2000.
(60) Provisional application No. 60/227,182, filed on Aug. 22, 2000.
(60) Provisional application No. 60/225,214, filed on Aug. 14, 2000.
(60) Provisional application No. 60/235,836, filed on Sep. 27, 2000.
(60) Provisional application No. 60/230,438, filed on Sep. 6, 2000.
(60) Provisional application No. 60/215,135, filed on Jun. 30, 2000.
(60) Provisional application No. 60/225,266, filed on Aug. 14, 2000.
(60) Provisional application No. 60/249,218, filed on Nov. 17, 2000.
(60) Provisional application No. 60/249,208, filed on Nov. 17, 2000.
(60) Provisional application No. 60/249,213, filed on Nov. 17, 2000.
(60) Provisional application No. 60/249,212, filed on Nov. 17, 2000.
(60) Provisional application No. 60/249,207, filed on Nov. 17, 2000.
(60) Provisional application No. 60/249,245, filed on Nov. 17, 2000.
(60) Provisional application No. 60/249,244, filed on Nov. 17, 2000.
(60) Provisional application No. 60/249,217, filed on Nov. 17, 2000.
(60) Provisional application No. 60/249,211, filed on Nov. 17, 2000.
(60) Provisional application No. 60/249,215, filed on Nov. 17, 2000.
(60) Provisional application No. 60/249,264, filed on Nov. 17, 2000.
(60) Provisional application No. 60/249,214, filed on Nov. 17, 2000.
(60) Provisional application No. 60/249,297, filed on Nov. 17, 2000.
(60) Provisional application No. 60/232,400, filed on Sep. 14, 2000.
(60) Provisional application No. 60/231,242, filed on Sep. 8, 2000.
(60) Provisional application No. 60/232,081, filed on Sep. 8, 2000.
(60) Provisional application No. 60/232,080, filed on Sep. 8, 2000.
(60) Provisional application No. 60/231,414, filed on Sep. 8, 2000.
(60) Provisional application No. 60/231,244, filed on Sep. 8, 2000.
(60) Provisional application No. 60/233,064, filed on Sep. 14, 2000.
(60) Provisional application No. 60/233,063, filed on Sep. 14, 2000.
(60) Provisional application No. 60/232,397, filed on Sep. 14, 2000.
(60) Provisional application No. 60/232,399, filed on Sep. 14, 2000.
(60) Provisional application No. 60/232,401, filed on Sep. 14, 2000.
(60) Provisional application No. 60/241,808, filed on Oct. 20, 2000.
(60) Provisional application No. 60/241,826, filed on Oct. 20, 2000.
(60) Provisional application No. 60/241,786, filed on Oct. 20, 2000.
(60) Provisional application No. 60/241,221, filed on Oct. 20, 2000.
(60) Provisional application No. 60/246,475, filed on Nov. 8, 2000.
(60) Provisional application No. 60/231,243, filed on Sep. 8, 2000.
(60) Provisional application No. 60/233,065, filed on Sep. 14, 2000.
(60) Provisional application No. 60/232,398, filed on Sep. 14, 2000.
(60) Provisional application No. 60/234,998, filed on Sep. 25, 2000.
(60) Provisional application No. 60/246,477, filed on Nov. 8, 2000.
(60) Provisional application No. 60/246,528, filed on Nov. 8, 2000.
(60) Provisional application No. 60/246,525, filed on Nov. 8, 2000.
(60) Provisional application No. 60/246,476, filed on Nov. 8, 2000.
(60) Provisional application No. 60/246,526, filed on Nov. 8, 2000.
(60) Provisional application No. 60/249,209, filed on Nov. 17, 2000.
(60) Provisional application No. 60/246,527, filed on Nov. 8, 2000.
(60) Provisional application No. 60/246,523, filed on Nov. 8, 2000.
(60) Provisional application No. 60/246,524, filed on Nov. 8, 2000.
(60) Provisional application No. 60/246,478, filed on Nov. 8, 2000.
(60) Provisional application No. 60/246,609, filed on Nov. 8, 2000.
(60) Provisional application No. 60/246,613, filed on Nov. 8, 2000.
(60) Provisional application No. 60/249,300, filed on Nov. 17, 2000.
(60) Provisional application No. 60/249,265, filed on Nov. 17, 2000.
(60) Provisional application No. 60/246,610, filed on Nov. 8, 2000.
(60) Provisional application No. 60/246,611, filed on Nov. 8, 2000.
(60) Provisional application No. 60/230,437, filed on Sep. 6, 2000.
(60) Provisional application No. 60/251,990, filed on Dec. 8, 2000.
(60) Provisional application No. 60/251,988, filed on Dec. 5, 2000.
(60) Provisional application No. 60/251,030, filed on Dec. 5, 2000.
(60) Provisional application No. 60/251,479, filed on Dec. 6, 2000.
(60) Provisional application No. 60/256,719, filed on Dec. 5, 2000.
(60) Provisional application No. 60/250,160, filed on Dec. 1, 2000.
(60) Provisional application No. 60/251,989, filed on Dec. 8, 2000.
(60) Provisional application No. 60/250,391, filed on Dec. 1, 2000.
(60) Provisional application No. 60/254,097, filed on Dec. 11, 2000.
(60) Provisional application No. 60/231,968, filed on Sep. 12, 2000.
(60) Provisional application No. 60/226,279, filed on Aug. 18, 2000.
(60) Provisional application No. 60/186,350, filed on Mar. 2, 2000.
(60) Provisional application No. 60/184,664, filed on Feb. 24, 2000.
(60) Provisional application No. 60/189,874, filed on Mar. 16, 2000.
(60) Provisional application No. 60/198,123, filed on Apr. 18, 2000.
(60) Provisional application No. 60/227,009, filed on Aug. 23, 2000.
(60) Provisional application No. 60/235,484, filed on Sep. 26, 2000.
(60) Provisional application No. 60/190,076, filed on Mar. 17, 2000.
(60) Provisional application No. 60/209,467, filed on Jun. 7, 2000.
(60) Provisional application No. 60/205,515, filed on May 19, 2000.
(60) Provisional application No. 60/259,678, filed on Jan. 5, 2001.

(51) Int. Cl. C12Q 1/68; C07H 21/04; C12N 9/00; C12P 21/02; C12N 5/06

(52) U.S. Cl. 435/6; 435/69.1; 435/183; 435/320.1; 435/325; 536/23.2

(57) ABSTRACT

The present invention relates to novel prostate cancer related polynucleotides and the polypeptides encoded by these polynucleotides herein collectively known as “prostate cancer antigens,” and the use of such prostate cancer antigens for detecting disorders of the prostate, particularly the presence of prostate cancer and prostate cancer metastases. More specifically, isolated prostate cancer associated nucleic acid molecules are provided encoding novel prostate cancer associated polypeptides. Novel prostate cancer polypeptides and antibodies that bind to these polypeptides are provided. Also provided are vectors, host cells, and recombinant and synthetic methods for producing human prostate cancer associated polynucleotides and/or polypeptides. The invention further relates to diagnostic and therapeutic methods useful for diagnosing, treating, preventing and/or prognosing disorders related to the prostate, including prostate cancer, and therapeutic methods for treating such disorders. The invention further relates to screening methods for identifying agonists and antagonists of polynucleotides and polypeptides of the invention. The present invention further relates to methods and/or compositions for inhibiting the production and function of the polypeptides of the present invention.

### Statement under 37 C.F.R. §1.77(b)(4)

[0001] This application refers to a “Sequence Listing” listed below, which is provided as an electronic document on two identical compact discs (CD-R), labeled “Copy 1” and “Copy 2.” These compact discs each contain the file “PA118C1_seqList.txt” (1,322,566 bytes, created on Mar. 6, 2002), which is hereby incorporated in its entirety herein.

[0002] The Sequence Listing may be viewed on an IBM-PC machine running the MS-Windows operating system.

### FIELD OF THE INVENTION

[0003] The present invention relates to novel prostate cancer related polynucleotides, the polypeptides encoded by these polynucleotides herein collectively referred to as “prostate cancer antigens,” and antibodies that immunospecifically bind these polypeptides, and the use of such prostate cancer polynucleotides, antigens, and antibodies for detecting, treating, preventing and/or prognosing disorders of the reproductive system, particularly disorders of the prostate, including, but not limited to, the presence of prostate cancer and prostate cancer metastases. More specifically, isolated prostate cancer nucleic acid molecules are provided encoding novel prostate cancer polypeptides. Novel prostate cancer polypeptides and antibodies that bind to these polypeptides are provided. Also provided are vectors, host cells, and recombinant and synthetic methods for producing human prostate cancer polynucleotides, polypeptides, and/or antibodies. The invention further relates to diagnostic and therapeutic methods useful for diagnosing, treating, preventing and/or prognosing disorders related to the prostate, including prostate cancer, and therapeutic methods for treating such disorders. The invention, further relates to screening methods for identifying agonists and antagonists of polynucleotides and polypeptides of the invention. The invention further relates to methods and/or compositions for inhibiting or promoting the production and/or function of the polypeptides of the invention.

### BACKGROUND OF THE INVENTION

[0004] The normal prostate gland is quite small, weighing only about one ounce, and comprised of approximately 30% muscular tissue and 70% glandular tissue. The prostate wraps around the urethra, through which urine and semen are carried out to the tip of the penis. The primary function of the prostate is to produce a necessary fluid component of semen; just prior to male orgasm muscular contractions squeeze this fluid into the urethra. Disorders of the prostate gland, such as prostate cancers, are typically manifested by enlargement of the gland, leading to such symptoms as impaired urinary flow, infertility, and pain.

[0005] About 180,000 new cases of prostate cancer in the United States and 16,000 in Canada are diagnosed every year. Cancer of the prostate is now the second most common type of cancer in males, although the causes of prostate cancer are not well understood. While men of any age can develop prostate cancer, it is found most frequently in men over age 50, with risk increasing with age.

[0006] Most prostate cancers are adenocarcinomas, cancers that arise in glandular cells of the prostate's epithelial tissue. Types of prostate cancers also include, but are not limited to, transitional cell carcinomas, ductal carcinomas, and squamous cell carcinomas. Prostate cancers usually progress slowly and produce no symptoms in the initial stages. Eventually, the tumor may enlarge the prostate gland, pressing on the urethra and causing painful or frequent urination and blood in the urine or semen. Sometimes pain in the lower back, pelvis, or upper thighs may signal that prostate cancer cells have spread to the ribs, pelvis, and other bones. The prognosis for prostate cancer is quite good if it is caught and treated early. The five-year survival rate for American men with prostate cancer is almost 93 percent, but this number rises to almost 100 percent if the tumor is caught early.

[0007] Current therapies include watchful waiting, surgery, radiation therapy, and hormone therapy, which may lead to such unpleasant side effects as incontinence, impotence, dry orgasm, pubic hair loss, nausea, breast growth, and decreased libido.

[0008] There are a variety of techniques for early detection and characteristics of prostate cancers, however, none of them are devoid of problems. Because prostate cancer is a notoriously silent disease with few early symptoms, there is an urgent need for identification and characterization of factors that modulate activation and differentiation of prostate cells, both normally and in disease states. In particular, there is a need to isolate and characterize additional molecules that mediate apoptosis, DNA repair, tumor-mediated angiogenesis, genetic imprinting, immune responses to tumors and tumor antigens, among other things, that can play a role in detecting, preventing, ameliorating or correcting dysfunctions or diseases related to the prostate.

[0009] The discovery of new human prostate cancer associated polynucleotides, the polypeptides encoded by them, and antibodies that immunospecifically bind these polypeptides, satisfies a need in the art by providing new compositions which are useful in the diagnosis, treatment, prevention and/or prognosis of disorders of the reproductive system, particularly disorders of the prostate, including, but not limited to, prostate cancers such as adenocarcinoma, transitional cell carcinomas, ductal carcinomas, and squamous cell carcinomas, as well as inflammatory disorders, such as chronic prostatitis, granulomatous prostatitis and malacoplakia, prostatic hyperplasia, and as described under “Hyperproliferative Disorders” and/or “Reproductive System Disorders” below.

### SUMMARY OF THE INVENTION

[0010] The present invention relates to novel prostate cancer-related polynucleotides, the polypeptides encoded by these polynucleotides herein collectively referred to as “prostate cancer antigens,” and antibodies that immunospecifically bind these polypeptides, and the use of such prostate cancer polynucleotides, antigens, and antibodies for detecting, treating, preventing and/or prognosing disorders of the reproductive system, particularly disorders of the prostate, including, but not limited to, the presence of prostate cancer and prostate cancer metastases. More specifically, isolated prostate cancer nucleic acid molecules are provided encoding novel prostate cancer polypeptides. Novel prostate cancer polypeptides and antibodies that bind to these polypeptides are provided. Also provided are vectors, host cells, and recombinant and synthetic methods for producing human prostate cancer polynucleotides, polypeptides, and/or antibodies. The invention further relates to diagnostic and therapeutic methods useful for diagnosing, treating, preventing and/or prognosing disorders related to the prostate, including prostate cancer, and therapeutic methods for treating such disorders. The invention further relates to screening methods for identifying agonists and antagonists of polynucleotides and polypeptides of the invention. The invention further relates to methods and/or compositions for inhibiting or promoting the production and/or function of the polypeptides of the invention.

### DETAILED DESCRIPTION

### Tables

[0011] Table 1A summarizes some of the polynucleotides encompassed by the invention (including cDNA clones related to the sequences (Clone ID NO:Z), contig sequences (contig identifier (Contig ID:) and contig nucleotide sequence identifier (SEQ ID NO:X)) and further summarizes certain characteristics of these polynucleotides and the polypeptides encoded thereby. The first column provides a unique clone identifier, “Clone ID NO:Z”, for a cDNA plasmid related to each prostate cancer associated contig sequence disclosed in Table 1A. The second column provides a unique contig identifier, “Contig ID:” for each of the contig sequences disclosed in Table 1A. The third column provides the sequence identifier, “SEQ ID NO:X”, for each of the contig polynucleotide sequences disclosed in Table 1A. The fourth column, “ORF (From-To)”, provides the location (i.e., nucleotide position numbers) within the polynucleotide sequence of SEQ ID NO:X that delineate the preferred open reading frame (ORF) shown in the sequence listing and referenced in Table 1A as SEQ ID NO:Y (column 5). Column 6 lists residues comprising predicted epitopes contained in the polypeptides encoded by each of the preferred ORFs (SEQ ID NO:Y). Identification of potential immunogenic regions was performed according to the method of Jameson and Wolf (CABIOS, 4:181-186 (1988)); specifically, the Genetics Computer Group (GCG) implementation of this algorithm, embodied in the program PEPTIDESTRUCTURE (Wisconsin Package v10.0, Genetics Computer Group (GCG), Madison, Wis.). This method returns a measure of the probability that a given residue is found on the surface of the protein. Regions where the antigenic index score is greater than 0.9 over at least 6 amino acids are indicated in Table 1A as “Predicted Epitopes.” In particular embodiments, prostate cancer associated polypeptides of the invention comprise, or alternatively consist of, one, two, three, four, five or more of the predicted epitopes described in Table 1A. It will be appreciated that depending on the analytical criteria used to predict antigenic determinants, the exact address of the determinant may vary slightly. Column 7, “Tissue Distribution” shows the expression profile of tissue, cells, and/or cell line libraries which express the polynucleotides of the invention. The first number in column 7 (preceding the colon), represents the tissue/cell source identifier code corresponding to the code and description provided in Table 4. Expression of these polynucleotides was not observed in the other tissues and/or cell libraries tested. For those identifier codes in which the first two letters are not “AR”, the second number in column 7 (following the colon), represents the number of times a sequence corresponding to the reference polynucleotide sequence (e.g., SEQ ID NO:X) was identified in the tissue/cell source. Those tissue/cell source identifier codes in which the first two letters are “AR” designate information generated using DNA array technology. Utilizing this technology, cDNAs were amplified by PCR and then transferred, in duplicate, onto the array. Gene expression was assayed through hybridization of first strand cDNA probes to the DNA array. cDNA probes were generated from total RNA extracted from a variety of different tissues and cell lines. Probe synthesis was performed in the presence of ³³P dCTP, using oligo(dT) to prime reverse transcription. After hybridization, high stringency washing conditions were employed to remove non-specific hybrids from the array. The remaining signal, emanating from each gene target, was measured using a Phosphorimager. Gene expression was reported as Phosphor Stimulating Luminescence (PSL) which reflects the level of phosphor signal generated from the probe hybridized to each of the gene targets represented on the array. A local background signal subtraction was performed before the total signal generated from each array was used to normalize gene expression between the different hybridizations. The value presented after “[array code]:” represents the mean of the duplicate values, following background subtraction and probe normalization. One of skill in the art could routinely use this information to identify normal and/or diseased tissue(s) which show a predominant expression pattern of the corresponding polynucleotide of the invention or to identify polynucleotides which show predominant and/or specific tissue and/or cell expression. Column 8, “Cytologic Band,” provides the chromosomal location of polynucleotides corresponding to SEQ ID NO:X. Chromosomal location was determined by finding exact matches to EST and cDNA sequences contained in the NCBI (National Center for Biotechnology Information) UniGene database. Given a presumptive chromosomal location, disease locus association was determined by comparison with the Morbid Map, derived from Online Mendelian Inheritance in Man (Online Mendelian Inheritance in Man, OMIM™. McKusick-Nathans Institute for Genetic Medicine, Johns Hopkins University (Baltimore, Md.) and National Center for Biotechnology Information, National Library of Medicine (Bethesda, Md.) 2000. World Wide Web URL: http://www.ncbi.nlm.nih.gov/omim/). If the putative chromosomal location of the Query overlapped with the chromosomal location of a Morbid Map entry, an OMIM identification number is provided in column 9 labeled “OMIM Disease Reference(s)”. A key to the OMIM reference identification numbers is provided in Table 5.

[0012] Table 1B summarizes additional polynucleotides encompassed by the invention (including cDNA clones related to the sequences (Clone ID NO:Z), contig sequences (contig identifier (Contig ID:) contig nucleotide sequence identifiers (SEQ ID NO:X)), and genomic sequences (SEQ ID NO:B). The first column provides a unique clone identifier, “Clone ID NO:Z”, for a cDNA clone related to each contig sequence. The second column provides the sequence identifier, “SEQ ID NO:X”, for each contig sequence. The third column provides a unique contig identifier, “Contig ID:” for each contig sequence. The fourth column, provides a BAC identifier “BAC ID NO:A” for the BAC clone referenced in the corresponding row of the table. The fifth column provides the nucleotide sequence identifier, “SEQ ID NO:B” for a fragment of the BAC clone identified in column four of the corresponding row of the table. The sixth column, “Exon From-To”, provides the location (i.e., nucleotide position numbers) within the polynucleotide sequence of SEQ ID NO:B which delineate certain polynucleotides of the invention that are also exemplary members of polynucleotide sequences that encode polypeptides of the invention (e.g., polypeptides containing amino acid sequences encoded by the polynucleotide sequences delineated in column six, and fragments and variants thereof).

[0013] Table 2 summarizes homology and-features of some of the polypeptides of the invention. The first column provides a unique clone identifier, “Clone ID NO:Z”, corresponding to a cDNA disclosed in Table 1A. The second column provides the unique contig identifier, “Contig ID:” corresponding to contigs in Table 1A and allowing for correlation with the information in Table 1A. The third column provides the sequence identifier, “SEQ ID NO:X”, for the contig polynucleotide sequences. The fourth column provides the analysis method by which the homology/identity disclosed in the row was determined. Comparisons were made between polypeptides encoded by the polynucleotides of the invention and either a non-redundant protein database (herein referred to as “NR”), or a database of protein families (herein referred to as “PFAM”) as further described below. The fifth column provides a description of PFAM/NR hits having significant matches to a polypeptide of the invention. Column six provides the accession number of the PFAM/NR hit disclosed in the fifth column. Column seven, “Score/Percent Identity”, provides a quality score or the percent identity, of the hit disclosed in column five. Columns 8 and 9, “NT From” and “NT To” respectively, delineate the polynucleotides in “SEQ ID NO:X” that encode a polypeptide having a significant match to the PFAM/NR database as disclosed in the fifth column. In specific embodiments, polypeptides of the invention comprise, or alternatively consist of, an amino acid sequence encoded by the polynucleotides in SEQ ID NO:X as delineated in columns 8 and 9, or fragments or variants thereof.

[0014] Table 3 provides polynucleotide sequences that may be disclaimed according to certain embodiments of the invention. The first column provides a unique clone identifier, “Clone ID NO:Z”, for a cDNA clone related to prostate cancer associated contig sequences disclosed in Table 1A. The second column provides the sequence identifier, “SEQ ID NO:X”, for contig polynucleotide sequences disclosed in Table 1A. The third column provides the unique contig identifier, “Contig ID”, for contigs disclosed in Table 1A. The fourth column provides a unique integer ‘a’ where ‘a’ is any integer between 1 and the final nucleotide minus 15 of SEQ ID NO:X, represented as “Range of a”, and the fifth column provides a unique integer ‘b’ where ‘b’ is any integer between 15 and the final nucleotide of SEQ ID NO:X, represented as “Range of b”, where both a and b correspond to the positions of nucleotide residues shown in SEQ ID NO:X, and where b is greater than or equal to a +14. For each of the polynucleotides shown as SEQ ID NO:X, the uniquely defined integers can be substituted into the general formula of a-b, and used to describe polynucleotides which may be preferably excluded from the invention. In certain embodiments, preferably excluded from the polynucleotides of the invention (including polynucleotide fragments and variants as described herein and diagnostic and/or therapeutic uses based on these polynucleotides) are at least one, two, three, four, five, ten, or more of the polynucleotide sequence(s) having the accession number(s) disclosed in the sixth column of this Table (including for example, published sequence in connection with a particular BAC clone). In further embodiments, preferably excluded from the invention are the specific polynucleotide sequence(s) contained in the clones corresponding to at least one, two, three, four, five, ten, or more of the available material having the accession numbers identified in the sixth column of this Table (including for example, the actual sequence contained in an identified BAC clone).

[0015] Table 4 provides a key to the tissue/cell source identifier code disclosed in Table 1A, column 7. Column 1 provides the key to the tissue/cell source identifier code disclosed in Table 1A, Column 7. Columns 2-5 provide a description of the tissue or cell source. Codes corresponding to diseased tissues are indicated in column 6 with the word “disease”. The use of the word “disease” in column 6 is non-limiting. The tissue or cell source may be specific (e.g. a neoplasm), or may be disease-associated (e.g., a tissue sample from a normal portion of a diseased organ). Furthermore, tissues and/or cells lacking the “disease” designation may still be derived from sources directly or indirectly involved in a disease state or disorder, and therefore may have a further utility in that disease state or disorder. In numerous cases where the tissue/cell source is a library, column 7 identifies the vector used to generate the library.

[0016] Table 5 provides a key to the OMIM™ reference identification numbers disclosed in Table 1A, column 9. OMIM reference identification numbers (Column 1) were derived from Online Mendelian Inheritance in Man (Online Mendelian Inheritance in Man, OMIM™. McKusick-Nathans Institute for Genetic Medicine, Johns Hopkins University (Baltimore, Md.) and National Center for Biotechnology Information, National Library of Medicine, (Bethesda, Md.) 2000. World Wide Web URL: http://www.ncbi.nlm.nih.gov/omim/). Column 2 provides diseases associated with the cytologic band disclosed in Table 1A, column 8, as determined from the Morbid Map database.

[0017] Table 6 summarizes ATCC Deposits, Deposit dates, and ATCC designation numbers of deposits made with the ATCC in connection with the present application.

[0018] Table 7 shows the cDNA libraries sequenced, tissue source description, vector information and ATCC designation numbers relating to these cDNA libraries.

[0019] Table 8 provides a physical characterization of clones encompassed by the invention. The first column provides the unique clone identifier, “Clone ID NO:Z”, for certain cDNA clones of the invention, as described in Table 1A. The second column provides the size of the cDNA insert contained in the corresponding cDNA clone.

### Definitions

[0020] The following definitions are provided to facilitate understanding of certain terms used throughout this specification.

[0021] In the present invention, “isolated” refers to material removed from its original environment (e.g., the natural environment if it is naturally occurring), and thus is altered “by the hand of man” from its natural state. For example, an isolated polynucleotide could be part of a vector or a composition of matter, or could be contained within a cell, and still be “isolated” because that vector, composition of matter, or particular cell is not the original environment of the polynucleotide. The term “isolated” does not refer to genomic or cDNA libraries, whole cell total or mRNA preparations, genomic DNA preparations (including those separated by electrophoresis and transferred onto blots), sheared whole cell genomic DNA preparations or other compositions where the art demonstrates no distinguishing features of the polynucleotide sequences of the present invention.

[0022] As used herein, a “polynucleotide” refers to a molecule having a nucleic acid sequence encoding SEQ ID NO:Y or a fragment or variant thereof; a nucleic acid sequence contained in SEQ ID NO:X (as described in column 3 of Table 1A) or the complement thereof; a cDNA sequence contained in Clone ID NO:Z (as described in column 1 of Table 1A and contained within a library deposited with the ATCC); a nucleotide sequence encoding the polypeptide encoded by a nucleotide sequence in SEQ ID NO:B as defined in column 6 of Table 1B or a fragment or variant thereof; or a nucleotide coding sequence in SEQ ID NO:B as defined in column 6 of Table 1B or the complement thereof. For example, the polynucleotide can contain the nucleotide sequence of the full length cDNA sequence, including the 5′ and 3′ untranslated sequences, the coding region, as well as fragments, epitopes, domains, and variants of the nucleic acid sequence. Moreover, as used herein, a “polypeptide” refers to a molecule having an amino acid sequence encoded by a polynucleotide of the invention as broadly defined (obviously excluding poly-Phenylalanine or poly-Lysine peptide sequences which result from translation of a polyA tail of a sequence corresponding to a cDNA).

[0023] As used herein, a “prostate cancer antigen” refers collectively to any polynucleotide disclosed herein (e.g., a nucleic acid sequence contained in SEQ ID NO:X or the complement therof, or cDNA sequence contained in Clone ID NO:Z, or a nucleotide sequence encoding the polypeptide encoded by a nucleotide sequence in SEQ ID NO:B as defined in column 6 of Table 1B, or a nucleotide coding sequence in SEQ ID NO:B as defined in column 6 of Table 1B or the complement thereof and fragments or variants thereof as described herein) or any polypeptide disclosed herein (e.g., an amino acid sequence contained in SEQ ID NO:Y, an amino acid sequence encoded by SEQ ID NO:X, or the complement thereof, an amino acid sequence encoded by the cDNA sequence contained in Clone ID NO:Z, an amino acid sequence encoded by SEQ ID NO:B, or the complement thereof, and fragments or variants thereof as described herein). These prostate cancer antigens have been determined to be predominantly expressed in prostate cancer tissues, including normal or diseased tissues (as shown in Table 1A column 7 and Table 4).

[0024] In the present invention, “SEQ ID NO:X” was often generated by overlapping sequences contained in multiple clones (contig analysis). A representative clone containing all or most of the sequence for SEQ ID NO:X is deposited at Human Genome Sciences, Inc. (HGS) in a catalogued and archived library. As shown, for example, in column 1 of Table 1A, each clone is identified by a cDNA Clone ID (identifier generally referred to herein as Clone ID NO:Z). Each Clone ID is unique to an individual clone and the Clone ID is all the information needed to retrieve a given clone from the HGS library. Furthermore, certain clones disclosed in this application have been deposited with the ATCC on Oct. 5, 2000, having the ATCC designation numbers PTA 2574 and PTA 2575; and on Jan. 5, 2001, having the depositor reference numbers TS-1, TS-2, AC-1, and AC-2. In addition to the individual cDNA clone deposits, most of the cDNA libraries from which the clones were derived were deposited at the American Type Culture Collection (hereinafter “ATCC”). Table 7 provides a list of the deposited cDNA libraries. One can use the Clone ID NO:Z to determine the library source by reference to Tables 6 and 7. Table 7 lists the deposited cDNA libraries by name and links each library to an ATCC Deposit. Library names contain four characters, for example, “HTWE.” The name of a cDNA clone (Clone ID NO:Z) isolated from that library begins with the same four characters, for example “HTWEP07”. As mentioned below, Table 1A correlates the Clone ID NO:Z names with SEQ ID NO:X. Thus, starting with an SEQ ID NO:X, one can use Tables 1A, 6 and 7 to determine the corresponding Clone ID NO:Z, which library it came from and which ATCC deposit the library is contained in. Furthermore, it is possible to retrieve a given cDNA clone from the source library by techniques known in the art and described elsewhere herein. The ATCC is located at 10801 University Boulevard, Manassas, Va. 20110-2209, USA. The ATCC deposits were made pursuant to the terms of the Budapest Treaty on the international recognition of the deposit of microorganisms for the purposes of patent procedure.

[0025] In specific embodiments, the polynucleotides of the invention are at least 15, at least 30, at least 50, at least 100, at least 125, at least 500, or at least 1000 continuous nucleotides but are less than or equal to 300 kb, 200 kb, 100 kb, 50 kb, 15 kb, 10 kb, 7.5 kb, 5 kb, 2.5 kb, 2.0 kb, or 1 kb, in length. In a further embodiment, polynucleotides of the invention comprise a portion of the coding sequences, as disclosed herein, but do not comprise all or a portion of any intron. In another embodiment, the polynucleotides comprising coding sequences do not contain coding sequences of a genomic flanking gene (i.e., 5′ or 3′ to the gene of interest in the genome). In other embodiments, the polynucleotides of the invention do not contain the coding sequence of more than 1000, 500, 250, 100, 50, 25, 20, 15, 10, 5, 4, 3, 2, or 1 genomic flanking gene(s).

[0026] A “polynucleotide” of the present invention also includes those polynucleotides capable of hybridizing, under stringent hybridization conditions, to sequences contained in SEQ ID NO:X, or the complement thereof (e.g., the complement of any one, two, three, four, or more of the polynucleotide fragments described herein), the polynucleotide sequence delineated in columns 8 and 9 of Table 2 or the complement thereof, and/or cDNA sequences contained in Clone ID NO:Z (e.g., the complement of any one, two, three, four, or more of the polynucleotide fragments, or the cDNA clone within the pool of cDNA clones deposited with the ATCC, described herein) and/or the polynucleotide sequence delineated in column 6 of Table 1B or the complement thereof. “Stringent hybridization conditions” refers to an overnight incubation at 42 degree C in a solution comprising 50% formamide, 5×SSC (750 mM NaCl, 75 mM trisodium citrate), 50 mM sodium phosphate (pH 7.6), 5× Denhardt's solution, 10% dextran sulfate, and 20 μg/ml denatured, sheared salmon sperm DNA, followed by washing the filters in 0.1×SSC at about 65 degree C.

[0027] Also contemplated are nucleic acid molecules that hybridize to the polynucleotides of the present invention at lower stringency hybridization conditions. Changes in the stringency of hybridization and signal detection are primarily accomplished through the manipulation of formamide concentration (lower percentages of formamide result in lowered stringency), salt conditions, or temperature. For example, lower stringency conditions include an overnight incubation at 37 degree C. in a solution comprising 6×SSPE (20×SSPE=3M NaCl; 0.2M NaH₂PO₄; 0.02M EDTA, pH 7.4), 0.5% SDS, 30% formamide, 100 ug/ml salmon sperm blocking DNA; followed by washes at 50 degree C. with 1×SSPE, 0.1% SDS. In addition, to achieve even lower stringency, washes performed following stringent hybridization can be done at higher salt concentrations (e.g. 5×SSC).

[0028] Note that variations in the above conditions may be accomplished through the inclusion and/or substitution of alternate blocking reagents used to suppress background in hybridization experiments. Typical blocking reagents include Denhardt's reagent, BLOTTO, heparin, denatured salmon sperm DNA, and commercially available proprietary formulations. The inclusion of specific blocking reagents may require modification of the hybridization conditions described above, due to problems with compatibility.

[0029] Of course, a polynucleotide which hybridizes only to polyA+ sequences (such as any 3′ terminal polyA+ tract of a cDNA shown in the sequence listing), or to a complementary stretch of T (or U) residues, would not be included in the definition of “polynucleotide,” since such a polynucleotide would hybridize to any nucleic acid molecule containing a poly (A) stretch or the complement thereof (e.g., practically any double-stranded cDNA clone generated using oligo dT as a primer).

[0030] The polynucleotide of the present invention can be composed of any polyribonucleotide or polydeoxribonucleotide, which may be unmodified RNA or DNA or modified RNA or DNA. For example, polynucleotides can be composed of single- and double-stranded DNA, DNA that is a mixture of single- and double-stranded regions, single- and double-stranded RNA, and RNA that is mixture of single- and double-stranded regions, hybrid molecules comprising DNA and RNA that may be single-stranded or, more typically, double-stranded or a mixture of single- and double-stranded regions. In addition, the polynucleotide can be composed of triple-stranded regions comprising RNA or DNA or both RNA and DNA. A polynucleotide may also contain one or more modified bases or DNA or RNA backbones modified for stability or for other reasons. “Modified” bases include, for example, tritylated bases and unusual bases such as inosine. A variety of modifications can be made to DNA and RNA; thus, “polynucleotide” embraces chemically, enzymatically, or metabolically modified forms.

[0031] The polypeptide of the present invention can be composed of amino acids joined to each other by peptide bonds or modified peptide bonds, i.e., peptide isosteres, and may contain amino acids other than the 20 gene-encoded amino acids. The polypeptides may be modified by either natural processes, such as posttranslational processing, or by chemical modification techniques which are well known in the art. Such modifications are well described in basic texts and in more detailed monographs, as well as in a voluminous research literature. Modifications can occur anywhere in a polypeptide, including the peptide backbone, the amino acid side-chains and the amino or carboxyl termini. It will be appreciated that the same type of modification may be present in the same or varying degrees at several sites in a given polypeptide. Also, a given polypeptide may contain many types of modifications. Polypeptides may be branched, for example, as a result of ubiquitination, and they may be cyclic, with or without branching. Cyclic, branched, and branched cyclic polypeptides may result from posttranslation natural processes or may be made by synthetic methods. Modifications include acetylation, acylation, ADP-ribosylation, amidation, covalent attachment of flavin, covalent attachment of a heme moiety, covalent attachment of a nucleotide or nucleotide derivative, covalent attachment of a lipid or lipid derivative, covalent attachment of phosphotidylinositol, cross-linking, cyclization, disulfide bond formation, demethylation, formation of covalent cross-links, formation of cysteine, formation of pyroglutamate, formylation, gamma-carboxylation, glycosylation, GPI anchor formation, hydroxylation, iodination, methylation, myristoylation, oxidation, pegylation, proteolytic processing, phosphorylation, prenylation, racemization, selenoylation, sulfation, transfer-RNA mediated addition of amino acids to proteins such as arginylation, and ubiquitination. (See, for instance, PROTEINS—STRUCTURE AND MOLECULAR PROPERTIES, 2nd Ed., T. E. Creighton, W. H. Freeman and Company, New York (1993); POSTTRANSLATIONAL COVALENT MODIFICATION OF PROTEINS, B. C. Johnson, Ed., Academic Press, New York, pgs. 1-12 (1983); Seifter et al., Meth. Enzymol. 182:626-646 (1990); Rattan et al., Ann. N.Y. Acad. Sci. 663:48-62 (1992).)

[0032] “SEQ ID NO:X” refers to a polynucleotide sequence described, for example, in Tables 1A or 2, while “SEQ ID NO:Y” refers to a polypeptide sequence described in column 5 of Table 1A. SEQ ID NO:X is identified by an integer specified in column 3 of Table 1A. The polypeptide sequence SEQ ID NO:Y is a translated open reading frame (ORF) encoded by polynucleotide SEQ ID NO:X. “Clone ID NO:Z” refers to a cDNA clone described in column 1 of Table 1A.

[0033] “A polypeptide having biological activity” refers to a polypeptide exhibiting activity similar to, but not necessarily identical to, an activity of a polypeptide of the present invention, including mature forms, as measured in a particular biological assay, with or without dose dependency. In the case where dose dependency does exist, it need not be identical to that of the polypeptide, but rather substantially similar to the dose-dependence in a given activity as compared to the polypeptide of the present invention (i.e., the candidate polypeptide will exhibit greater activity or not more than about 25-fold less and, preferably, not more than about tenfold less activity, and most preferably, not more than about three-fold less activity relative to the polypeptide of the present invention).

[0034] Table 1A summarizes some of the polynucleotides encompassed by the invention (including contig sequences (SEQ ID NO:X) and clones (Clone ID NO:Z) and further summarizes certain characteristics of these polynucleotides and the polypeptides encoded thereby.

### Polynucleotides and Polypeptides

[0035] TABLE 1A

| | | | | | | Tissue Distribution | | |
|---|---|---|---|---|---|---|---|---|
| | | | | AA SEQ | | Library code: count | | OMIM |
| Clone ID | | | ORF | ID | | (see TABLE IV for | | Disease |
| NO: Z | Contig ID: | SEQ ID NO: X | (From-To) | NO: Y | Predicted Epitopes | Library Codes) | Cytologic Band | References(s): |
| HBZAJ09 | 655769 | 11 | 1-330 | 222 | Phe-13 to Phe-18, | S0188: 2 | | |
| | | | | | Gly-23 to Arg-38. | | | |
| HBZSH16 | 655619 | 12 | 93-212 | 223 | Ser-1 to Ser-11. | S0190: 2 | | |
| HBZSH71 | 760418 | 13 | 116-301 | 224 | Thr-29 to Arg-34. | S0190: 2 | | |
| HBZSI73 | 655737 | 14 | 2-352 | 225 | | S0190: 2 | | |
| HHLAB29 | 557871 | 15 | 184-324 | 226 | Ala-1 to Leu-9, | H0696: 507, T0091: 1 | | |
| | | | | | Gln-26 to Asp-31, | and S0136: 1. | | |
| | | | | | Gly-34 to Arg-39. | | | |
| HLIAJ47 | 655738 | 16 | 52-192 | 227 | Val-19 to Ser-26, | H0130: 2 | | |
| | | | | | Phe-33 to Gly-40. | | | |
| HLIAJ83 | 655547 | 17 | 107-238 | 228 | Val-32 to Pro-38. | H0130: 2 | | |
| HLIAN33 | 655562 | 18 | 3-347 | 229 | Arg-28 to Glu-42, | H0130: 2 | | |
| | | | | | Asp-77 to Gln-84. | | | |
| HLIAN45 | 535125 | 19 | 2-235 | 230 | | H0130: 2 | | |
| HLIAN67 | 655721 | 20 | 156-257 | 231 | | H0130: 2 | | |
| HLIAS26 | 655696 | 21 | 73-243 | 232 | | H0130: 2 | | |
| HPEAF19 | 867892 | 22 | 3-224 | 233 | | H0165:2 | | |
| HPEBA51 | 723298 | 23 | 61-255 | 234 | IIe-18 to Asn-25. | H0166: 2 and L0598: | | |
| | | | | | | 1. | | |
| HPEBD31 | 655760 | 24 | 3-200 | 235 | | H0166: 2 and L0604: | | |
| | | | | | | 1. | | |
| HPFAA06 | 960801 | 25 | 283-426 | 236 | | H0168: 1 and H0169: | | |
| | | | | | | 1. | | |
| HPFCA36 | 524720 | 26 | 40-288 | 237 | Ser-12 to Ser-17, | H0169: 2 | 6p21.1-p21.3 | 106300, |
| | | | | | Lys-24 to Ser-34. | | | 108800, |
| | | | | | | | | 120290, |
| | | | | | | | | 120290, |
| | | | | | | | | 120810, |
| | | | | | | | | 120820, |
| | | | | | | | | 142857, |
| | | | | | | | | 142858, |
| | | | | | | | | 150270, |
| | | | | | | | | 167250, |
| | | | | | | | | 170261, |
| | | | | | | | | 177900, |
| | | | | | | | | 179450, |
| | | | | | | | | 179605, |
| | | | | | | | | 179605, |
| | | | | | | | | 179605, |
| | | | | | | | | 179605, |
| | | | | | | | | 179605, |
| | | | | | | | | 180297, |
| | | | | | | | | 201910, |
| | | | | | | | | 217000, |
| | | | | | | | | 222100, |
| | | | | | | | | 233100, |
| | | | | | | | | 235200, |
| | | | | | | | | 248611, |
| | | | | | | | | 256550, |
| | | | | | | | | 256550, |
| | | | | | | | | 263200, |
| | | | | | | | | 600202, |
| | | | | | | | | 600261, |
| | | | | | | | | 600364, |
| | | | | | | | | 601498, |
| | | | | | | | | 601690, |
| | | | | | | | | 601868, |
| | | | | | | | | 602280, |
| | | | | | | | | 602475 |
| HPFCA71 | 655596 | 27 | 130-363 | 238 | Glu-28 to Gly-42. | H0169: 2 | | |
| HPFCF09 | 536666 | 28 | 152-355 | 239 | | H0169: 2 | | |
| HPFCF24 | 655744 | 29 | 186-398 | 240 | | H0169: 2 | | |
| HPFCF40 | 968600 | 30 | 353-189 | 241 | Ser-2 to Pro-10. | H0169: 2 | | |
| HPFCF83 | 781490 | 31 | 38-193 | 242 | Ala-38 to Ser-48. | H0169: 2 | | |
| HPFCH15 | 655768 | 32 | 154-357 | 243 | Met-4 to Leu-9, | H0169: 2 | | |
| | | | | | Gly-39 to Gln-46. | | | |
| HPFCH89 | 655538 | 33 | 65-139 | 244 | Ser-15 to Leu-23. | H0169: 2 | | |
| HPFCM41 | 655736 | 34 | 135-287 | 245 | | H0169: 2 | | |
| HPFCM87 | 925495 | 35 | 2-244 | 246 | Leu-18 to Arg-25, | H0169: 2 | | |
| | | | | | Gly-35 to Lys-40. | | | |
| HPFCN08 | 960365 | 36 | 20-166 | 247 | Ser-18 to Thr-25. | H0169: 2 and L0519: | 22q13.1 | 103050, |
| | | | | | | 1. | | 103050, |
| | | | | | | | | 124030, |
| | | | | | | | | 124030, |
| | | | | | | | | 138981, |
| | | | | | | | | 182380, |
| | | | | | | | | 188826, |
| | | | | | | | | 190040, |
| | | | | | | | | 190040, |
| | | | | | | | | 190040 |
| HPFCO02 | 867871 | 37 | 1-210 | 248 | Glu-11 to Thr-19. | H0169: 2, L0749: 2 | | |
| | | | | | | and L0748: 1 | | |
| HPFCQ88 | 655749 | 39 | 273-401 | 250 | | H0169: 2 | | |
| HPFCR21 | 655621 | 40 | 190-411 | 251 | | H0169: 2 | | |
| HPFCR82 | 655533 | 41 | 140-286 | 252 | Lys-9 to Thr-14, | H0169: 2 | | |
| | | | | | Glu-21 to Pro-26. | | | |
| HPFCT09 | 655563 | 42 | 13-120 | 253 | Met-1 to Cys-9. | H0169: 2 | | |
| HPFCT53 | 974257 | 43 | 271-522 | 254 | IIe-3 to Ala-14, | H0169: 2 | | |
| | | | | | Arg-63 to Pro-68. | | | |
| HPFCT62 | 655432 | 44 | 82-198 | 255 | Glu-9 to Arg-15, | H0169: 2 | | |
| | | | | | Pro-24 to Tyr-39. | | | |
| HPFCV19 | 655706 | 45 | 79-195 | 256 | Leu-5 to Ser-11, | H0169: 2 and L0776: | | |
| | | | | | Pro-13 to His-19, | 1. | | |
| | | | | | Lys-34 to Tyr-39. | | | |
| HPFCX18 | 655588 | 46 | 153-263 | 257 | Ser-16 to Asp-26. | H0169: 2 | | |
| HPFDD06 | 960700 | 47 | 2-16 3 | 258 | Lys-23 to Val-34. | H0169: 2 | | |
| HPFDE38 | 655704 | 48 | 67-330 | 259 | Leu-4 to Lys-18, | H0169: 2 and L0809: | | |
| | | | | | Gly-36 to Glu-45, | 1. | | |
| | | | | | Lys-60 to Cys-65. | | | |
| HPFDE61 | 974249 | 49 | 392-538 | 260 | Asp-1 to Arg-7, | H0169: 4 | | |
| | | | | | Thr-17 to Asn-22, | | | |
| | | | | | Leu-25 to Pro-30. | | | |
| HPFDF79 | 973732 | 50 | 156-320 | 261 | Ser-3 to Tyr-9. | H0169: 3 | | |
| HPFDG58 | 655610 | 51 | 121-318 | 262 | Cys-32 to Pro-38. | H0169: 2 | | |
| HPFDI23 | 655549 | 52 | 197-367 | 263 | Leu-5 to Gly-10. | H0169: 2 | | |
| HPFDL90 | 954333 | 53 | 2-202 | 264 | | H0169: 2 | | |
| HPFDS59 | 655543 | 54 | 8-160 | 265 | | H0169: 2 | | |
| HPFDT17 | 581133 | 55 | 166-342 | 266 | Pro-18 to Asn-25. | H0169: 2 | | |
| HPFDT54 | 655530 | 56 | 36-212 | 267 | | H0169: 2 and L0763: | | |
| | | | | | | 1. | | |
| HPFDT61 | 974569 | 57 | 63-173 | 268 | | H0169: 3 | | |
| HPFDU30 | 522113 | 58 | 2-232 | 269 | His-46 to Pro-51. | H0169: 2 | | |
| HPFDU38 | 867879 | 59 | 36-167 | 270 | | H0169: 2 | | |
| HPFDU59 | 739617 | 60 | 214-369 | 271 | | H0169: 2 | | |
| HPFDV71 | 867870 | 61 | 124-354 | 272 | Pro-14 to Gly-25. | AR050: 117, AR054: | | |
| | | | | | | 88, AR051: 81 | | |
| | | | | | | H0169: 2 | | |
| HPFDZ20 | 655764 | 62 | 25-213 | 273 | | H0169: 2 | | |
| HPFEA08 | 960372 | 63 | 2-187 | 274 | Ile-1 to Gly-44. | H0169: 3 | | |
| HPFEA32 | 925499 | 64 | 142-309 | 275 | | H0169: 2 | | |
| HPIAE79 | 655748 | 65 | 17-394 | 276 | Asn-1 to Lys-7, | S0150: 2 | | |
| | | | | | Pro-14 to Cys-23. | | | |
| HPIAO83 | 655595 | 66 | 2-334 | 277 | Ser-1 to Arg-7, | S0150: 2 | | |
| | | | | | Pro-57 to Trp-67, | | | |
| | | | | | Pro-70 to Ala-75, | | | |
| | | | | | Ser-87 to Gly-95. | | | |
| HPIAQ49 | 919469 | 67 | 106-243 | 278 | Pro-39 to Glu-46. | S0150: 2 | | |
| HPIAQ76 | 655573 | 68 | 61-2 | 279 | Lys-1 to Lys-17. | S0150: 2 | | |
| HPIAV80 | 615007 | 69 | 64-174 | 280 | Ser-8 to His-16. | S0150: 2 | | |
| HPIAZ37 | 655753 | 70 | 2-289 | 281 | | S0150: 2 | | |
| HPIBQ37 | 884289 | 71 | 2-424 | 282 | Ile-47 to Val-53, | AR089: 4, AR061: 2 | | |
| | | | | | Phe-71 to Thr-76, | S0150: 2 | | |
| | | | | | Ser-105 to Thr-113, | | | |
| | | | | | Glu-121 to Ser-129. | | | |
| HPIBT49 | 655719 | 72 | 176-283 | 283 | Tyr-30 to Cys-36. | S0150: 2 | | |
| HPIBY65 | 655757 | 73 | 133-294 | 284 | | S0150: 2 | | |
| HPJAB19 | 655540 | 74 | 1-153 | 285 | | S0152: 2 | | |
| HPJAB84 | 655531 | 75 | 3-269 | 286 | His-I to Asp-6, | S0152: 2 | | |
| | | | | | Ala-16 to Ala-25. | | | |
| HPJAC36 | 655601 | 76 | 154-330 | 287 | Cys-5 to Gly-12, | S0152: 2 AND L0780: 1. | | |
| | | | | | Ser-47 to Arg-52. | | | |
| HPJAC92 | 867831 | 77 | 3-251 | 288 | His-1 to Leu-19. | S0152: 2 | | |
| HPJAD09 | 655712 | 78 | 180-332 | 289 | | S0152: 2 | | |
| HPJAD66 | 655694 | 79 | 141-290 | 290 | Val-2 to Ser-14, | 80152: 2 | | |
| | | | | | Gly-27 to Ala-37. | | | |
| HPJAD82 | 655765 | 80 | 53-187 | 291 | Arg-5 to Lys-13, | S0152: 2 | | |
| | | | | | Ser-20 to Thr-25. | | | |
| HPJAV07 | 952852 | 81 | 180-335 | 292 | Leu-43 to Cys-51. | S0152: 2 | | |
| HPJBI17 | 655761 | 82 | 162-326 | 293 | Ser-29 to Arg-35. | S0152: 2 | | |
| HPJBI89 | 655708 | 83 | 1-81 | 294 | Ser-19 to Gln-25. | S0152: 2 | | |
| HPJBK52 | 655751 | 84 | 99-263 | 295 | | S0152: 2 | | |
| HPJBU08 | 958979 | 85 | 29-193 | 296 | Gln-13 to Thr-18, | S0152: 2 | | |
| | | | | | His-40 to Met-45. | | | |
| HPJBV17 | 655729 | 86 | 10-123 | 297 | | S0152: 2 | | |
| HPJCC04 | 926787 | 87 | 32-370 | 298 | Asn-42 to Gly-51. | S0152: 2 | | |
| HPJCP10 | 964259 | 88 | 113-244 | 299 | | S0152: 2 | | |
| HPJCS84 | 590404 | 89 | 2-286 | 300 | | S0152: 2 | | |
| HPJCX15 | 655730 | 90 | 245-334 | 301 | | S0152: 2 | | |
| HPJCX26 | 655600 | 91 | 239-349 | 302 | | S0152: 2 | | |
| HPJCY70 | 655569 | 92 | 111-203 | 303 | Pro-3 to Cys-11. | S0152: 2 | | |
| HPJCZ03 | 922850 | 93 | 79-183 | 304 | Val-2 to Thr-8. | S0152: 2 | | |
| HPJCZ06 | 934170 | 94 | 102-242 | 305 | Ser-1 to Gly-16. | S0152: 2 | | |
| HPJDA08 | 958182 | 95 | 438-1031 | 306 | Leu-8 to Lys-19, | S0152: and L0070: 1. | | |
| | | | | | Asp-25 to Arg-33, | | | |
| | | | | | Ser-40 to Ser-63, | | | |
| | | | | | Ala-70 to Val-77, | | | |
| | | | | | Glu-91 to Asp-97, | | | |
| | | | | | His-108 to Asn-116, | | | |
| | | | | | Lys-130 to Glu-136, | | | |
| | | | | | Asp-139 to Val-144. | | | |
| HPJDJ58 | 906904 | 96 | 386-556 | 307 | | S0152: 2 | | |
| HPJDX94 | 838748 | 97 | 79-183 | 308 | | S0152: 2 | | |
| HPJEI55 | 926815 | 98 | 14-130 | 309 | Gly-1 to Pro-7. | S0152: 2 | | |
| HPJEJ39 | 930988 | 99 | 284-538 | 310 | Gly-1 to Ala-11. | S0152: 2 | | |
| HPJEQ22 | 867725 | 100 | 239-448 | 311 | Thr-29 to Gly-38. | S0152: 2 | | |
| HPJET90 | 836503 | 101 | 39-377 | 312 | His-8 to Gly-18, | AR061: 0, AR089: 0 | | |
| | | | | | Leu-40 to Ile-45, | S0152: 2 | | |
| | | | | | Asn-100 to Asp-105. | | | |
| HPJEV06 | 934096 | 102 | 70-213 | 313 | Leu-17 to Glu-23, | S0152: 2 | | |
| | | | | | Arg-27 to Glu-35. | | | |
| HPQBN30 | 915897 | 103 | 4-120 | 314 | | H0696: 507, T0091: 1 | | |
| | | | | | | and S0136: 1. | | |
| HPZAB38 | 655591 | 104 | 138-254 | 315 | | S0168: 2 | | |
| HPWTA06 | 936026 | 105 | 71-427 | 316 | | H0383: 1 and L0589: | | |
| | | | | | | 1. | | |
| HPJFA10 | 963322 | 106 | 466-341 | 317 | Gln-9 to Ala-15. | L0783: 1, L0809: 1 and | | |
| | | | | | | S0152: 1. | | |
| HPJEV95 | 929723 | 107 | 82-408 | 318 | | AR061: 4, AR089: 1 | | |
| | | | | | | S0152: 1 and L0601: 1. | | |
| HPJEU01 | 928408 | 108 | 209-352 | 319 | | S0152: 1 and L0439: 1. | | |
| HPJET11 | 965894 | 109 | 136-327 | 320 | Lys-35 to Lys-42. | L071: 1, S0152: 1 and | | |
| | | | | | | L0756: 1. | | |
| HPJES17 | 859867 | 110 | 19-318 | 321 | Glu-8 to Cys-16. | L0435: 1, S0152: 1, | | |
| | | | | | | L0439: 1 and L0747: 1. | | |
| HPJEL02 | 918315 | 111 | 50-220 | 322 | Pro-26 to Phe-35. | S0152: 1 and L0745: 1. | | |
| HPJEG53 | 974074 | 112 | 19-198 | 323 | | S0152: 1 | | |
| HPJDW93 | 867759 | 113 | 44-406 | 324 | | S0152: 1 and L0604: 1. | | |
| HPJDT03 | 922815 | 114 | 177-392 | 325 | | S0152: 1 and L0759: 1. | | |
| HPJDP54 | 949149 | 115 | 155-301 | 326 | | L0532: 1 and S0152: 1. | | |
| HPJDF61 | 889928 | 116 | 280-417 | 327 | | AR054: 38, AR051: 29, | | |
| | | | | | | AR050: 28 | | |
| | | | | | | S0152: 1 | | |
| HPJDC01 | 915056 | 117 | 212-358 | 328 | Asn-17 to Met-22. | S0152: 1 and L0779: 1. | | |
| HPJDA25 | 951281 | 118 | 246-506 | 329 | Gln-1 to Cys-17, | AR061: 6,AR089: 2 | | |
| | | | | | Gln-20 to Lys-28, | S0152: 1 | | |
| | | | | | Pro-35 to Ser-44. | | | |
| | 951284 | 214 | 252-13 | 425 | | | | |
| HPJCU29 | 928407 | 119 | 1-195 | 330 | | L0667: 1 and S0152: 1. | | |
| HPJCT81 | 494874 | 120 | 148-396 | 331 | Thr-2 to Asn-8, | S0152: 1 and L0605: 1. | | |
| | | | | | Asn-49 to Ser-54. | | | |
| HPJCT26 | 559949 | 121 | 210-635 | 332 | Arg-1 to Gly-7. | AR054: 34 | | |
| | | | | | | S0152: 1 | | |
| HPJCS73 | 975087 | 122 | 3-227 | 333 | Ser-33 to Lys-41. | S0152: 1 | | |
| HPJCS43 | 715082 | 123 | 62-322 | 334 | Pro-10 to Ser-17, | S0152: 1 | | |
| | | | | | Ser- 19 to Arg-24, | | | |
| | | | | | Pro-43 to Glu-50, | | | |
| | | | | | Arg-56 to Phe-64, | | | |
| | | | | | Pro-74 to His-87. | | | |
| HPJCS32 | 699046 | 124 | 179-274 | 335 | Val-23 to Leu-31. | S0152: 1 | | |
| HPJCN60 | 887600 | 125 | 1-210 | 336 | Ile-20 to Trp-33, | AR051: 17, AR050: 9, | | |
| | | | | | Thr-35 to Gly-45. | AR054: 8 | | |
| | | | | | S0152: 1 | | | |
| HPJCL55 | 670083 | 126 | 458-291 | 337 | Glu-11 to His-16. | L0758: 3, L0779: 2 and | | |
| | | | | | | S0152: 1. | | |
| HPJBU40 | 710928 | 127 | 137-373 | 338 | | LO748: 2 and S0152: 1. | | |
| HPJBU09 | 625362 | 128 | 3-182 | 339 | Arg-14 to Cys-22. | L04392: 2 and S0152: 1. | | |
| HPJBS74 | 765390 | 129 | 310-591 | 340 | | S0152: 1 and L0592: 1. | | |
| HPJBS52 | 726535 | 130 | 141-518 | 341 | Phe-2 to Asp-8. | S0152: 1 and L0743: 1. | | |
| HPJBS35 | 867818 | 131 | 64-249 | 342 | | S0152: 1 and L0748: 1. | | |
| HPJBL76 | 769889 | 132 | 340-546 | 343 | | S0152: 1, L0740: 1 and | | |
| | | | | | | L0750: 1. | | |
| HPJBL30 | 948721 | 133 | 354-145 | 344 | Tyr-10 to Leu-15, | L0752: 7, L0780: 2, | | |
| | | | | | Glu-32 to Gly-41. | L0586: 1 and S0152: 1. | | |
| HPJBK25 | 974606 | 134 | 17-154 | 345 | His-15 to Gln-26, | S0152: 1 | | |
| | | | | | Ser-38 to Asn-46. | | | |
| HPJBK14 | 974593 | 135 | 2-331 | 346 | Pro-8 to Leu-18, | S0152: 1 | | |
| | | | | | Gly-45 to Ala-S 3, | | | |
| | | | | | Pro-56 to Trp-63, | | | |
| | | | | | Pro-67 to Arg-73. | | | |
| HPJBH45 | 717088 | 136 | 252-404 | 347 | Ser-7 to Lys-12. | L0754: 2 and S0152: 1. | | |
| HPJAX30 | 607408 | 137 | 762-544 | 348 | | S0152: 1 | | |
| | 884685 | 215 | 104-370 | 426 | Ser-41 to Trp-46, | | | |
| | | | | | Cys-57 to Gln-68, | | | |
| | | | | | Tyr-79 to Gly-84. | | | |
| | 885717 | 216 | 643-1290 | 427 | | | | |
| HPJAU73 | 806718 | 138 | 170-319 | 349 | | S0152: 1 and L0748: 1. | | |
| HPJAP92 | 887830 | 139 | 164-322 | 350 | | AR050: 26, AR051: | | |
| | | | | | | 20, AR054: 10 | | |
| | | | | | | S0152: 1 | | |
| HPJAO13 | 824243 | 140 | 716-531 | 351 | Ser-2 to Arg-7. | ARO61: 2, AR089: 1 | | |
| | | | | | | S01S2: 1 | | |
| | 892302 | 217 | 865-1110 | 428 | Gln-10 to Lue-26. | | | |
| | 945194 | 218 | 127-612 | 429 | | | | |
| HPJAN69 | 754858 | 141 | 79-360 | 352 | Pro-75 to Phe-84. | S0152: 1 | | |
| HPJAN67 | 751384 | 142 | 3-176 | 353 | | S0152: 1 | | |
| HPJAN57 | 734503 | 143 | 65-166 | 354 | | S0152: 1 | | |
| HPJAJ20 | 669000 | 144 | 476-652 | 355 | Thr-31 to Glu-37. | S0152: 1 and L0439: 1. | | |
| HPJAE51 | 725761 | 145 | 193-2 | 356 | Ser-42 to Lys-48. | L0439: 2 and S0152: 1. | | |
| HPJAA27 | 419786 | 146 | 3-278 | 357 | Leu-17 to Asn-31, | S0152: 1 | 1q32.1 | 134580, |
| | | | | | Gly-55 to Ala-62, | | | 145260, |
| | | | | | Arg-66 to Ala-87. | | | 600105, |
| | | | | | | | | 600759, |
| | | | | | | | | 601975 |
| HPICG93 | 887817 | 147 | 20-310 | 358 | Leu-62 to Ser-75. | AR051: 32, AR050: | | |
| | | | | | | 26, AR054: 17 | | |
| | | | | | | S0150: 1 | | |
| HPICE06 | 935095 | 148 | 607-816 | 359 | | S0150: 1, L0439: 1 and | | |
| | | | | | | L0740: 1. | | |
| HPIBY36 | 708183 | 149 | 296-517 | 360 | L0439: 2, L0756: 2, | | | |
| | | | | | | S0150: 1 and L0438: 1. | | |
| HPIBT62 | 743135 | 150 | 123-362 | 361 | | S0150: 1, L0748: 1 and | | |
| | | | | | | L0439: 1. | | |
| HPIBO89 | 786741 | 151 | 213-473 | 362 | Lys-79 to Phe-85. | L0439: 3, S0150: 1, | | |
| | | | | | | L0740: 1 and L0749: 1. | | |
| HPIBI89 | 867845 | 152 | 1-135 | 363 | Glu-7 to Ser-13. | S0150: 1 and L0748: 1. | | |
| HPIBH31 | 838809 | 153 | 169-420 | 364 | Val-3 to Gly-14, | S0150: 1 and L0748: 1. | 2p22-p21 | 120435, |
| | | | | | Ser-65 to Gly-72. | | | 120435, |
| | | | | | | | | 126600, |
| | | | | | | | | 135300, |
| | | | | | | | | 136435, |
| | | | | | | | | 152790, |
| | | | | | | | | 152790, |
| | | | | | | | | 157170, |
| | | | | | | | | 182601, |
| | | | | | | | | 278300, |
| | | | | | | | | 601071, |
| | | | | | | | | 601771, |
| | | | | | | | | 602134 |
| HPIBC93 | 785971 | 154 | 1-285 | 365 | Ser-49 to Pro-54, | S0150: 1 and L0751: 1. | | |
| | | | | | Pro-60 to His-70. | | | |
| HPIBB45 | 867850 | 155 | 77-178 | 366 | | S0150: 1 | | |
| HPIBB43 | 715037 | 156 | 47-247 | 367 | | S0150: 1 | | |
| HPIBB32 | 698901 | 157 | 1-186 | 368 | | S0150: 1 | | |
| HPIBB19 | 668489 | 158 | 182-289 | 369 | | S0150: 1 | | |
| HPIAW91 | 790033 | 159 | 223-426 | 370 | Ala-6 to Ser-25. | L0748: 2 and S0150: 1. | | |
| HPIAV06 | 935111 | 160 | 41-322 | 371 | Cys-19 to Trp-24, | L0717: 2 and S0150: 1. | | |
| | | | | | Ser-29 to Glu-34, | | | |
| | | | | | Phe-47 to Trp-52, | | | |
| | | | | | Arg-57 to Gly-68. | | | |
| HPIAQ70 | 973604 | 161 | 185-436 | 372 | Gly-36 to Thr-41. | AR089: 18, AR061: 9 | | |
| | | | | | | S0150: 1 | | |
| HPIAP79 | 774817 | 162 | 102-476 | 373 | Asp-7 to Thr-15. | L0439: 6 and S0150: 1. | | |
| HPIAD10 | 906987 | 163 | 547-834 | 374 | Lys-91 to Pro-96. | S0150: 1 and L0365: 1. | | |
| | 961313 | 219 | 172-35 | 430 | | | | |
| HPFDX38 | 709302 | 164 | 398-583 | 375 | | H0169: 1 and L0766: 1. | | |
| HPFCZ82 | 780198 | 165 | 3-341 | 376 | Pro-108 to Gly-113. | H0169: 1 and L0747: 1. | | |
| HPFCZ60 | 430125 | 166 | 298-444 | 377 | | H0169: 1 and L0740: 1. | | |
| HPFCZ10 | 968360 | 167 | 33-272 | 378 | | H0169: 1 | | |
| HPFCR23 | 675120 | 168 | 93-263 | 379 | Thr-52 to Tyr-57. | HO169: 1, L0809: 1 | | |
| | | | | | | and L0754: 1. | | |
| HPFCP82 | 867881 | 169 | 435-632 | 380 | Pro-24 to Gly-44, | AR050: 7, AR054: 3, | | |
| | | | | | Pro-47 to Tyr-56. | AR051: 1 | | |
| | | | | | | H0169: 1 | | |
| HPFCP53 | 526574 | 170 | 138-245 | 381 | | AR050: 20, AR051: 4, | | |
| | | | | | | AR054: 4 | | |
| | | | | | | H0169: 1 | | |
| HPFCM45 | 723501 | 171 | 72-251 | 382 | | H0169: 1, L0766: 1, | | |
| | | | | | | L0776:1, L0790: 1, | | |
| | | | | | | L0741: 4 and L0779: 1. | | |
| HPFCM27 | 682098 | 172 | 178-294 | 383 | | L0598: 2, H0169: 1 | | |
| | | | | | | and L0731: 1. | | |
| HPFCL56 | 732601 | 173 | 20-187 | 384 | Cys-6 to His-17. | H0169: 1 and L0777: 1. | | |
| HPFCL24 | 867889 | 174 | 56-274 | 385 | | L0752: 2, H0169: 1, | | |
| | | | | | | L0794: 1 and L0751: 1. | | |
| HPFCG02 | 921196 | 175 | 94-261 | 386 | Gly-33 to Arg-39. | H0169: 1 and L0748: 1. | | |
| HPFCA01 | 928672 | 176 | 151-393 | 387 | Gly-18 to His-30. | L0748: 2 and H0169: 1. | | |
| HPEBT82 | 524246 | 177 | 1-111 | 388 | | H0166: 1 | | |
| HPEBT78 | 773844 | 178 | 59-148 | 389 | Lys-15 to Gly-25. | H0166: 1 | | |
| HPEBT68 | 753692 | 179 | 45-245 | 390 | Lys-9 to Trp-17. | H0166: 1 | | |
| HPEBT54 | 731002 | 180 | 86-397 | 391 | Lys-26 to Cys-31, | H0166: 1 | | |
| | | | | | Arg-38 to Asp-46. | | | |
| HPEBT49 | 530021 | 181 | 106-300 | 392 | Leu-12 to Ser-17. | H0166: 1 | | |
| HPEBT34 | 706836 | 182 | 44-301 | 393 | Asp-20 to His-27. | H0166: 1 | | |
| HPEBT14 | 535061 | 183 | 3-98 | 394 | | H0166: 1 | | |
| HPEBT07 | 954214 | 184 | 42-317 | 395 | Thr-78 to Arg-84. | H0166: 1 | | |
| HPEBO67 | 578516 | 185 | 1-228 | 396 | Glu-12 to Thr-39. | H0166: 1, L0748: 1 | | |
| | | | | | | and L0747: 1. | | |
| HPEBL08 | 960240 | 186 | 227-313 | 397 | Lys-19 to Asn-27. | L0770: 2, H0166: 1, | | |
| | | | | | | L0665: 1 and L0749: 1. | | |
| HPEBH01 | 921767 | 187 | 105-341 | 398 | | H0166: 1 and L0745: 1. | | |
| HPEBG89 | 785942 | 188 | 80-277 | 399 | Gly-2 to Cys-7, | L0759: 2 and H0166: 1. | | |
| | | | | | Glu-28 to Glu-40, | | | |
| | | | | | Glu-53 to Lys-58. | | | |
| HPEBG10 | 867888 | 189 | 75-284 | 400 | Phe-26 to Trp-32. | H0166: 1 and L0542: 1. | | |
| HPEBA89 | 910250 | 190 | 268-504 | 401 | Cys-14 to Ser-26, | AR061: 57, AR089: 38 | | |
| | | | | | Glu-40 to Lys-58. | H0166: 1 and L0749: 1. | | |
| | 912272 | 220 | 182-361 | 431 | Cys-14 to Ser-26, | | | |
| | | | | | Glu-40 to Lys-60. | | | |
| HPEBA61 | 742251 | 191 | 2-70 | 402 | | H0166: 1 | | |
| HPEBA05 | 928027 | 192 | 2-178 | 403 | Gly-14 to Ser-19. | H0166: 1 and L0779: 1. | | |
| HPEAG43 | 468542 | 193 | 83-232 | 404 | | H0165: 1 | | |
| | 589933 | 221 | 776-1117 | 432 | Pro-4 to Thr-17. | | | |
| HPEAD72 | 761472 | 194 | 45-383 | 405 | | H0165: 1 and L0744: 1. | | |
| HPEAB12 | 968847 | 195 | 2-178 | 406 | Ser-7 to Lys-13, | L0794: 4 and H0165: 1. | | |
| | | | | | Leu-29 to Ser-36. | | | |
| HPEAA57 | 514231 | 196 | 199-414 | 407 | Leu-11 to Ala-18, | H0165: 1 | | |
| | | | | | Gly-22 to Ser-41. | | | |
| HPEAA40 | 867899 | 197 | 186-308 | 408 | | H0165: 1 and L0526: 1. | | |
| HL3AG56 | 786383 | 198 | 219-1 | 409 | Leu-35 to Trp-40, | L0439:2 and H0132: 1. | | |
| | | | | | Ser-51 to Asp-58. | | | |
| HL3AC02 | 921152 | 199 | 107-424 | 410 | | H0132: 1, L0769: 1 | | |
| | | | | | | and L0748: 1. | | |
| HL3AB26 | 685005 | 200 | 205-375 | 411 | Ser-3 to Ala-9, | H0132: 1 and L0745: 1. | | |
| | | | | | Gln-18 to Leu-27. | | | |
| HL2AD32 | 699746 | 201 | 55-207 | 412 | Gln-7 to Gly-13, | H0131: 1, L0766: 1, | | |
| | | | | | Ser-24 to His-30. | L0776: 1 and L0740: 1. | | |
| HL2AB67 | 774114 | 202 | 268-507 | 413 | Lys-30 to Gln-49. | H0131: 1 and L0589:1. | | |
| HLISA13 | 621397 | 203 | 3-278 | 414 | | H0207: 1, L0749: 1, | | |
| | | | | | | L0780: 1, L0752: 1 and | | |
| | | | | | | L0599: 1. | | |
| HLIAN46 | 522981 | 204 | 171-293 | 415 | | H0130: 1 and L0763: 1. | | |
| HBZSK04 | 926407 | 205 | 2-79 | 416 | Gln-7 to Lys-14. | S0190: 1 | | |
| HBZSG02 | 920249 | 206 | 40-291 | 417 | | L0771: 2 and S0190: 1. | | |
| HBZSD32 | 699335 | 207 | 59-427 | 418 | Val-8 to Leu-14, | S0190: 1 | | |
| | | | | | Pro-22 to Arg-3 1, | | | |
| | | | | | Thr-62 to Lys-68, | | | |
| | | | | | Arg-76 to Cys-82, | | | |
| | | | | | Trp-85 to His-91. | | | |
| HBZAJ73 | 764479 | 208 | 2-244 | 419 | | L0741: 3 and S0188: 1. | | |
| HBZAJ26 | 681879 | 209 | 198-443 | 420 | Gly-38 to Ser-44. | S0188: 1 and L0747: 1. | | |
| HBZAI39 | 847621 | 210 | 545-808 | 421 | | S0188: 1 and L0605: 1. | | |
| HBZAI14 | 847620 | 211 | 3-203 | 422 | | S0188: 1 | | |
| HBZAB15 | 660348 | 212 | 240-362 | 423 | Lys-26 to His-31. | S0188: 1 and L0587: 1. | | |
| HBZAB08 | 959560 | 213 | 160-414 | 424 | Pro-1 to Gln-15, | L0774: 3, L0775: 1, | | |
| | | | | | Gln-38 to Asn-45, | L0809: 1, S0188: 1 and | | |
| | | | | | Pro-57 to Thr-65. | L0758: 1. | | |

[0036] The first column in Table 1A provides a unique “Clone ID NO:Z” for a cDNA clone related to each contig sequence disclosed in Table 1A. This clone ID references the cDNA clone which contains at least the 5′ most sequence of the assembled contig, and at least a portion of SEQ ID NO:X was determined by directly sequencing the referenced clone. The reference clone may have more sequence than described in the sequence listing or the clone may have less. In the vast majority of cases, however, the clone is believed to encode a full-length polypeptide. In the case where a clone is not full-length, a full-length cDNA can be obtained by methods known in the art and/or as described elsewhere herein.

[0037] The second column in Table 1A provides a unique “Contig ID” identification for each contig sequence. The third column provides the “SEQ ID NO:X” identifier for each of the prostate cancer associated contig polynucleotide sequences disclosed in Table 1A. The fourth column, “ORF (From-To)”, provides the location (i.e., nucleotide position numbers) within the polynucleotide sequence “SEQ ID NO:X” that delineate the preferred open reading frame (ORF) shown in the sequence listing and referenced in Table 1A, column 5, as SEQ ID NO:Y. Where the nucleotide position number “To” is lower than the nucleotide position number “From”, the preferred ORF is the reverse complement of the referenced polynucleotide sequence.

[0038] The fifth column in Table 1A provides the corresponding SEQ ID NO:Y for the polypeptide sequence encoded by the preferred ORF delineated in column 4. In one embodiment, the invention provides an amino acid sequence comprising, or alternatively consisting of, a polypeptide encoded by the portion of SEQ ID NO:X delineated by “ORF (From-To)”. Also provided are polynucleotides encoding such amino acid sequences and the complementary strand thereto.

[0039] Column 6 in Table 1A lists residues comprising epitopes contained in the polypeptides encoded by the preferred ORF (SEQ ID NO:Y), as predicted using the algorithm of Jameson and Wolf, (1988) Comp. Appl. Biosci. 4:181-186. The Jameson-Wolf antigenic analysis was performed using the computer program PROTEAN (Version 3.11 for the Power MacIntosh, DNASTAR, Inc., 1228 South Park Street Madison, Wis.). In specific embodiments, polypeptides of the invention comprise, or alternatively consist of, at least one, two, three, four, five or more of the predicted epitopes as described in Table 1A. It will be appreciated that depending on the analytical criteria used to predict antigenic determinants, the exact address of the determinant may vary slightly.

[0040] Column 7 in Table 1A provides an expression profile and library code: count for each of the contig sequences (SEQ ID NO:X) disclosed in Table 1A, which can routinely be combined with the information provided in Table 4 and used to determine the normal or diseased tissues, cells, and/or cell line libraries which predominantly express the polynucleotides of the invention. The first number in column 7 (preceding the colon), represents the tissue/cell source identifier code corresponding to the code and description provided in Table 4. For those identifier codes in which the first two letters are not “AR”, the second number in column 7 (following the colon) represents the number of times a sequence corresponding to the reference polynucleotide sequence was identified in the tissue/cell source. Those tissue/cell source identifier codes in which the first two letters are “AR” designate information generated using DNA array technology. Utilizing this technology, cDNAs were amplified by PCR and then transferred, in duplicate, onto the array. Gene expression was assayed through hybridization of first strand cDNA probes to the DNA array. cDNA probes were generated from total RNA extracted from a variety of different tissues and cell lines. Probe synthesis was performed in the presence of ³³P dCTP, using oligo(dT) to prime reverse transcription. After hybridization, high stringency washing conditions were employed to remove non-specific hybrids from the array. The remaining signal, emanating from each gene target, was measured using a Phosphorimager. Gene expression was reported as Phosphor Stimulating Luminescence (PSL) which reflects the level of phosphor signal generated from the probe hybridized to each of the gene targets represented on the array. A local background signal subtraction was performed before the total signal generated from each array was used to normalize gene expression between the different hybridizations. The value presented after “[array code]:” represents the mean of the duplicate values, following background subtraction and probe normalization. One of skill in the art could routinely use this information to identify normal and/or diseased tissue(s) which show a predominant expression pattern of the corresponding polynucleotide of the invention or to identify polynucleotides which show predominant and/or specific tissue and/or cell expression. The sequences disclosed herein have been determined to be predominantly expressed in prostate tissues, including normal and diseased prostate tissues (See Table 1A, column 7 and Table 4).

[0041] Column 8 in Table 1A provides a chromosomal map location for certain polynucleotides of the invention. Chromosomal location was determined by finding exact matches to EST and cDNA sequences contained in the NCBI (National Center for Biotechnology Information) UniGene database. Each sequence in the UniGene database is assigned to a “cluster”; all of the ESTs, cDNAs, and STSs in a cluster are believed to be derived from a single gene. Chromosomal mapping data is often available for one or more sequence(s) in a UniGene cluster; this data (if consistent) is then applied to the cluster as a whole. Thus, it is possible to infer the chromosomal location of a new polynucleotide sequence by determining its identity with a mapped UniGene cluster.

[0042] A modified version of the computer program BLASTN (Altshul et al., J. Mol. Biol. 215:403-410 (1990), and Gish et al., Nat. Genet. 3:266-272 (1993)) was used to search the UniGene database for EST or cDNA sequences that contain exact or near-exact matches to a polynucleotide sequence of the invention (the ‘Query’). A sequence from the UniGene database (the ‘Subject’) was said to be an exact match if it contained a segment of 50 nucleotides in length such that 48 of those nucleotides were in the same order as found in the Query sequence. If all of the matches that met this criteria were in the same UniGene cluster, and mapping data was available for this cluster, it is indicated in Table 1A under the heading “Cytologic Band”. Where a cluster had been further localized to a distinct cytologic band, that band is disclosed; where no banding information was available, but the gene had been localized to a single chromosome, the chromosome is disclosed.

[0043] Once a presumptive chromosomal location was determined for a polynucleotide of the invention, an associated disease locus was identified by comparison with a database of diseases which have been experimentally associated with genetic loci. The database used was the Morbid Map, derived from OMIM™ (supra). If the putative chromosomal location of a polynucleotide of the invention (Query sequence) was associated with a disease in the Morbid Map database, an OMIM reference identification number was noted in column 9, Table 1A, labeled “OMIM Disease Reference(s)”. Table 5 is a key to the OMIM reference identification numbers (column 1), and provides a description of the associated disease in Column 2.

TABLE 1B

| Clone ID | SEQ ID | CONTIG | | SEQ ID | EXON |
|---|---|---|---|---|---|
| NO:Z | NO:X | ID: | BAC ID:A | NO:B | From-To |
| HBZAJ09 | 11 | 655769 | AC019232 | 433 | 1-315 |
| HBZAJ09 | 11 | 655769 | AC025171 | 434 | 1-315 |
| HBZAJ09 | 11 | 655769 | AC019232 | 435 | 1-324 |
| HBZAJ09 | 11 | 655769 | AC025171 | 436 | 1-148 |
| HBZAJ09 | 11 | 655769 | AC019232 | 437 | 1-148 |
| HBZAJ09 | 11 | 655769 | AC025171 | 438 | 1-283 |
| HBZSH16 | 12 | 655619 | AC069483 | 439 | 1-554 |
| HBZSH16 | 12 | 655619 | AC069483 | 440 | 1-920 |
| HBZSH71 | 13 | 760418 | AC018693 | 441 | 1-741 |
| HBZSH71 | 13 | 760418 | AC018693 | 442 | 1-252 |
| HBZSI73 | 14 | 655737 | AC067954 | 443 | 1-313 |
| HBZSI73 | 14 | 655737 | AC067954 | 444 | 1-326 |
| HHLAB29 | 15 | 557871 | AL121813 | 445 | 1-173 |
| HHLAB29 | 15 | 557871 | AL023633 | 446 | 1-292 |
| HHLAB29 | 15 | 557871 | AL160371 | 447 | 1-994 |
| HL1AN67 | 20 | 655721 | AC023247 | 448 | 1-245 |
| HL1AN67 | 20 | 655721 | AC006237 | 449 | 1-245 |
| HL1AS26 | 21 | 655696 | AL157915 | 450 | 1-667 |
| HL1AS26 | 21 | 655696 | AL136294 | 451 | 1-667 |
| HPEAF19 | 22 | 867892 | AC024132 | 452 | 1-344 |
| HPEBA51 | 23 | 723298 | AL353788 | 453 | 1-434 |
| HPEBA51 | 23 | 723298 | AL139184 | 454 | 1-434 |
| HPEBA51 | 23 | 723298 | AL353788 | 455 | 1-143 |
| HPEBA51 | 23 | 723298 | AL139184 | 456 | 1-143 |
| HPEBD31 | 24 | 655760 | AC018761 | 457 | 1-538 |
| HPEBD31 | 24 | 655760 | AC020934 | 458 | 1-538 |
| HPEBD31 | 24 | 655760 | AC018761 | 459 | 1-263 |
| HPEBD31 | 24 | 655760 | AC020934 | 460 | 1-736 |
| | | | | | 792-957 |
| | | | | | 1232-1693 |
| | | | | | 1845-2006 |
| | | | | | 2206-2481 |
| | | | | | 2621-3482 |
| | | | | | 3536-3786 |
| | | | | | 3815-4535 |
| | | | | | 4695-5049 |
| HPEBD31 | 24 | 655760 | AC018761 | 461 | 1-736 |
| | | | | | 792-957 |
| | | | | | 1232-1693 |
| | | | | | 1845-2006 |
| | | | | | 2206-2481 |
| | | | | | 2621-3482 |
| | | | | | 3548-3786 |
| | | | | | 3815-4535 |
| | | | | | 4695-5049 |
| HPEBD31 | 24 | 655760 | AC020934 | 462 | 1-263 |
| HPFAA06 | 25 | 960801 | AC004111 | 463 | 1-863 |
| | | | | | 3429-4124 |
| HPFAA06 | 25 | 960801 | AC010277 | 464 | 1-863 |
| | | | | | 3424-4119 |
| HPFAA06 | 25 | 960801 | AC004111 | 465 | 1-667 |
| HPFAA06 | 25 | 960801 | AC004111 | 466 | 1-522 |
| HPFAA06 | 25 | 960801 | AC010277 | 467 | 1-667 |
| HPFAA06 | 25 | 960801 | AC010277 | 468 | 1-401 |
| HPFCA36 | 26 | 524720 | AC007065 | 469 | 1-340 |
| | | | | | 351-738 |
| | | | | | 1335-1773 |
| | | | | | 3899-4267 |
| | | | | | 14595-14825 |
| | | | | | 18322-18557 |
| | | | | | 19664-20128 |
| | | | | | 20663-20915 |
| | | | | | 22067-22299 |
| HPFCA36 | 26 | 524720 | AC007065 | 470 | 1-495 |
| HPFCA36 | 26 | 524720 | AC007065 | 471 | 1-483 |
| HPFCA71 | 27 | 655596 | AC018681 | 472 | 1-364 |
| HPFCF09 | 28 | 536666 | AC022417 | 473 | 1-174 |
| | | | | | 1973-2115 |
| | | | | | 2563-3003 |
| | | | | | 3442-3591 |
| | | | | | 4140-4231 |
| | | | | | 5955-6389 |
| | | | | | 6564-7100 |
| | | | | | 8645-8708 |
| | | | | | 8978-9101 |
| | | | | | 10914-11290 |
| | | | | | 11985-12297 |
| | | | | | 13345-13410 |
| | | | | | 14962-15695 |
| | | | | | 18991-19133 |
| | | | | | 20469-22756 |
| HPECF09 | 28 | 536666 | AC022417 | 474 | 1-104 |
| HPFCF24 | 29 | 655744 | AL160279 | 475 | 1-398 |
| HPFCF24 | 29 | 655744 | AL160279 | 476 | 1-313 |
| HPFCF83 | 31 | 781490 | AC036220 | 477 | 1-327 |
| HPFCF83 | 31 | 781490 | AC026273 | 478 | 1-327 |
| HPFCF83 | 31 | 781490 | AC018963 | 479 | 1-369 |
| HPFCF83 | 31 | 781490 | AC023099 | 480 | 1-369 |
| | | | | | 627-1264 |
| | | | | | 1708-2248 |
| HPFCF83 | 31 | 781490 | AC016424 | 481 | 1-393 |
| HPFCF83 | 31 | 781490 | AC008776 | 482 | 1-369 |
| HPFCF83 | 31 | 781490 | AC022264 | 483 | 1-369 |
| | | | | | 627-1264 |
| | | | | | 1708-2248 |
| HPFCF83 | 31 | 781490 | AC024972 | 484 | 1-390 |
| HPFCF83 | 31 | 781490 | AC036220 | 485 | 1-1419 |
| HPFCF83 | 31 | 781490 | AC026273 | 486 | 1-1420 |
| HPFCF83 | 31 | 781490 | AC023099 | 487 | 1-1529 |
| HPFCF83 | 31 | 781490 | AC016424 | 488 | 1-612 |
| HPFCF83 | 31 | 781490 | AC008776 | 489 | 1-339 |
| | | | | | 4826-4859 |
| HPFCF83 | 31 | 781490 | AC018963 | 490 | 1-1382 |
| | | | | | 1384-1518 |
| HPFCF83 | 31 | 781490 | AC023099 | 491 | 1-434 |
| HPFCF83 | 31 | 781490 | AC016424 | 492 | 1-1527 |
| HPFCF83 | 31 | 781490 | AC022264 | 493 | 1-1529 |
| HPFCF83 | 31 | 781490 | AC022264 | 494 | 1-434 |
| HPFCF83 | 31 | 781490 | AC024972 | 495 | 1-1524 |
| HPFCF83 | 31 | 781490 | AC024972 | 496 | 1-612 |
| HPFCH15 | 32 | 655768 | AC068428 | 497 | 1-352 |
| HPFCH89 | 33 | 655538 | AC012589 | 498 | 1-227 |
| HPFCH89 | 33 | 655538 | AC022088 | 499 | 1-227 |
| HPFCH89 | 33 | 655538 | AC012589 | 500 | 1-250 |
| HPFCH89 | 33 | 655538 | AC022088 | 501 | 1-250 |
| HPFCM41 | 34 | 655736 | AC008278 | 502 | 1-348 |
| HPFCM41 | 34 | 655736 | AC008271 | 503 | 1-348 |
| HPFCM41 | 34 | 655736 | AC008278 | 504 | 1-471 |
| HPFCM41 | 34 | 655736 | AC008271 | 505 | 1-471 |
| HPFCM87 | 35 | 925495 | AC004479 | 506 | 1-318 |
| HPFCM87 | 35 | 925495 | AC004480 | 507 | 1-318 |
| HPFCM87 | 35 | 925495 | AC004479 | 508 | 1-155 |
| HPFCM87 | 35 | 925495 | AC004480 | 509 | 1-155 |
| HPFCO02 | 37 | 867871 | AC019103 | 510 | 1-1224 |
| HPFCO67 | 38 | 867880 | AC024489 | 511 | 1-302 |
| HPFCR21 | 40 | 655621 | AC066603 | 512 | 1-448 |
| HPFCR21 | 40 | 655621 | AC066603 | 513 | 1-326 |
| HPFCT53 | 43 | 974257 | AC078894 | 514 | 1-654 |
| HPFCT53 | 43 | 974257 | AC026815 | 515 | 1-654 |
| HPFCT53 | 43 | 974257 | AC034258 | 516 | 1-648 |
| HPFCT53 | 43 | 974257 | AC078893 | 517 | 1-640 |
| HPFCT53 | 43 | 974257 | AC068667 | 518 | 1-654 |
| HPFCT53 | 43 | 974257 | AC073166 | 519 | 1-640 |
| HPFCT53 | 43 | 974257 | AC074226 | 520 | 1-640 |
| HPFCT53 | 43 | 974257 | AC027037 | 521 | 1-640 |
| HPFCT53 | 43 | 974257 | AC078898 | 522 | 1-640 |
| HPFCT53 | 43 | 974257 | AC068924 | 523 | 1-640 |
| HPFCT62 | 44 | 655432 | AC016767 | 524 | 1-389 |
| HPFCT62 | 44 | 655432 | AC026369 | 525 | 1-389 |
| HPFCT62 | 44 | 655432 | AL078621 | 526 | 1-389 |
| HPFCT62 | 44 | 655432 | AC016767 | 527 | 1-653 |
| HPFCT62 | 44 | 655432 | AC026369 | 528 | 1-104 |
| | | | | | 117-884 |
| | | | | | 890-1137 |
| HPFCT62 | 44 | 655432 | AL078621 | 529 | 1-1121 |
| HPFCX18 | 46 | 655588 | AC022598 | 530 | 1-559 |
| HPFCX18 | 46 | 655588 | AC024367 | 531 | 1-559 |
| HPFCX18 | 46 | 655588 | AC022598 | 532 | 1-484 |
| | | | | | 539-645 |
| HPFCX18 | 46 | 655588 | AC022598 | 533 | 1-421 |
| HPFCX18 | 46 | 655588 | AC024367 | 534 | 1-421 |
| HPFCX18 | 46 | 655588 | AC024367 | 535 | 1-484 |
| | | | | | 539-645 |
| HPFDD06 | 47 | 960700 | AL359314 | 536 | 1-282 |
| HPFDD06 | 47 | 960700 | AL390239 | 537 | 1-418 |
| HPFDD06 | 47 | 960700 | AL390239 | 538 | 1-157 |
| | | | | | 634-1162 |
| HPFDE38 | 48 | 655704 | AC073616 | 539 | 1-615 |
| HPFDE38 | 48 | 655704 | AC061966 | 540 | 1-615 |
| HPFDE38 | 48 | 655704 | AC061966 | 541 | 1-957 |
| HPFDE38 | 48 | 655704 | AC061966 | 542 | 1-396 |
| HPFDE79 | 50 | 973732 | AL139240 | 543 | 1-600 |
| HPFDF79 | 50 | 973732 | AL139240 | 544 | 1-497 |
| HPFDG58 | 51 | 655610 | AC021557 | 545 | 1-358 |
| HPFDG58 | 51 | 655610 | AC021557 | 546 | 1-308 |
| HPFDI23 | 52 | 655549 | AC044876 | 547 | 1-351 |
| HPFDI23 | 52 | 655549 | AC010983 | 548 | 1-351 |
| HPFDL23 | 52 | 655549 | AC010983 | 549 | 1-1694 |
| HPFDL90 | 53 | 954333 | U73330 | 550 | 1-204 |
| HPFDL90 | 53 | 954333 | AL137143 | 551 | 1-204 |
| HPFDL90 | 53 | 954333 | AL137143 | 552 | 1-114 |
| HPFDS59 | 54 | 655543 | AC004111 | 553 | 1-279 |
| HPFDS59 | 54 | 655543 | AC0041I1 | 554 | 1-429 |
| HPFDT17 | 55 | 581133 | AC021972 | 555 | 1-360 |
| HPFDT17 | 55 | 581133 | AC023961 | 556 | 1-360 |
| HPFDT17 | 55 | 581133 | AC023961 | 557 | 1-493 |
| HPFDT54 | 56 | 655530 | AC078787 | 558 | 1-337 |
| HPFDT54 | 56 | 655530 | AC068844 | 559 | 1-337 |
| HPFDT54 | 56 | 655530 | AC068844 | 560 | 1-156 |
| | | | | | 307-357 |
| HPFDT61 | 57 | 974569 | AC012456 | 561 | 1-429 |
| HPFDT61 | 57 | 974569 | AC012456 | 562 | 1-508 |
| HPFDU30 | 58 | 522113 | AL079301 | 563 | 1-353 |
| HPFDU30 | 58 | 522113 | AL079301 | 564 | 1-368 |
| HPEDU30 | 58 | 522113 | AL079301 | 565 | 1-477 |
| HPFDU38 | 59 | 867879 | AP001816 | 566 | 1-357 |
| HPFDU38 | 59 | 867879 | AC013785 | 567 | 1-357 |
| HPFDU38 | 59 | 867879 | AP001816 | 568 | 1-1082 |
| HPFDU38 | 59 | 867879 | AP001816 | 569 | 1-605 |
| HPFDU38 | 59 | 867879 | AC013785 | 570 | 1-1082 |
| HPFDU38 | 59 | 867879 | AC013785 | 571 | 1-605 |
| HPFDV71 | 61 | 867870 | AC004170 | 572 | 1-90 |
| HPFDV71 | 61 | 867870 | AC004170 | 573 | 1-498 |
| | | | | | 742-1013 |
| | | | | | 1596-1878 |
| | | | | | 2017-2131 |
| | | | | | 2550-3098 |
| HPFDZ20 | 62 | 655764 | AC026262 | 574 | 1-320 |
| HPFDZ20 | 62 | 655764 | AC026262 | 575 | 1-145 |
| HPFDZ20 | 62 | 655764 | AC026262 | 576 | 1-394 |
| HPFBA08 | 63 | 960372 | AL158145 | 577 | 1-102 |
| | | | | | 605-988 |
| | | | | | 994-1149 |
| | | | | | 1496-1658 |
| | | | | | 1689-2232 |
| | | | | | 2888-3316 |
| | | | | | 4118-5228 |
| | | | | | 5538-5638 |
| | | | | | 8075-8374 |
| | | | | | 9151-9248 |
| | | | | | 10537-10628 |
| | | | | | 14985-15054 |
| HPFEA08 | 63 | 960372 | AL158145 | 578 | 1-101 |
| HPFEA32 | 64 | 925499 | AF228661 | 579 | 1-296 |
| HPFEA32 | 64 | 925499 | AF215845 | 580 | 1-296 |
| HPIAE79 | 65 | 655748 | AC011234 | 581 | 1-367 |
| HPLAQ49 | 67 | 919469 | AL161913 | 582 | 1-434 |
| HPIAQ49 | 67 | 919469 | AC007951 | 583 | 1-434 |
| HPIAV80 | 69 | 615007 | AC011747 | 584 | 1-316 |
| | | | | | 562-618 |
| | | | | | 724-1313 |
| | | | | | 1814-2395 |
| HPIAV80 | 69 | 615007 | AC012495 | 585 | 1-316 |
| | | | | | 562-618 |
| | | | | | 724-1313 |
| | | | | | 1814-2395 |
| HPIAV80 | 69 | 615007 | AC011747 | 586 | 1-1776 |
| HPIAV80 | 69 | 615007 | AC012495 | 587 | 1-133 |
| | | | | | 239-638 |
| | | | | | 2245-2345 |
| | | | | | 3320-3556 |
| | | | | | 5015-8143 |
| HPIAZ37 | 70 | 655753 | AC018613 | 588 | 1-357 |
| | | | | | 1494-1815 |
| | | | | | 2463-5309 |
| | | | | | 5330-8041 |
| HPIAZ37 | 70 | 655753 | AL356099 | 589 | 1-357 |
| | | | | | 1495-1816 |
| | | | | | 2464-5308 |
| | | | | | 5330-8041 |
| | | | | | 16792-21577 |
| HPIAZ37 | 70 | 655753 | AL355474 | 590 | 1-357 |
| | | | | | 1494-1815 |
| | | | | | 2463-5308 |
| | | | | | 5329-8041 |
| HPIBT49 | 72 | 655719 | AC068558 | 591 | 1-468 |
| HPJAB19 | 74 | 655540 | AC027164 | 592 | 1-422 |
| HPJAB19 | 74 | 655540 | AC024388 | 593 | 1-422 |
| HPJAB19 | 74 | 655540 | AC027164 | 594 | 1-325 |
| HPJAB19 | 74 | 655540 | AC024388 | 595 | 1-325 |
| HPJAB84 | 75 | 655531 | AC013471 | 596 | 1-335 |
| HPJAC36 | 76 | 655601 | AC073476 | 597 | 1-107 |
| | | | | | 2096-2450 |
| | | | | | 3106-3182 |
| | | | | | 3643-3787 |
| | | | | | 4316-4982 |
| | | | | | 5399-5724 |
| | | | | | 6657-7075 |
| | | | | | 7479-7686 |
| | | | | | 9286-9495 |
| | | | | | 9701-9784 |
| | | | | | 10235-10339 |
| HPJAC92 | 77 | 867831 | AP001374 | 598 | 1-441 |
| HPJAC92 | 77 | 867831 | AP001845 | 599 | 1-441 |
| HPJAC92 | 77 | 867831 | AP001374 | 600 | 1-370 |
| HPJAC92 | 77 | 867831 | AP001845 | 601 | 1-370 |
| HPJAD09 | 78 | 655712 | AL356873 | 602 | 1-341 |
| HPJAD09 | 78 | 655712 | AL080239 | 603 | 1-341 |
| HPJAD66 | 79 | 655694 | Z83851 | 604 | 1-375 |
| HPJAD82 | 80 | 655765 | AC023550 | 605 | 1-599 |
| HPJAD82 | 80 | 655765 | AC078819 | 606 | 1-599 |
| HPJAD82 | 80 | 655765 | AC023550 | 607 | 1-262 |
| HPJAD82 | 80 | 655765 | AC078819 | 608 | 1-180 |
| HPJAD82 | 80 | 655765 | AC023550 | 609 | 1-180 |
| HPJAD82 | 80 | 655765 | AC078819 | 610 | 1-262 |
| HPJAV07 | 81 | 952852 | AC022990 | 611 | 1-330 |
| HPJAV07 | 81 | 952852 | AC022990 | 612 | 1-338 |
| HPJBL17 | 82 | 655761 | AC018493 | 613 | 1-433 |
| HPJBI17 | 82 | 655761 | AC018840 | 614 | 1-433 |
| HPJBI17 | 82 | 655761 | AC011327 | 615 | 1-433 |
| HPJBI17 | 82 | 655761 | AC023514 | 616 | 1-433 |
| HPJBI17 | 82 | 655761 | AC018493 | 617 | 1-4779 |
| HPJBI17 | 82 | 655761 | AC018840 | 618 | 1-4959 |
| | | | | | 7250-7380 |
| HPJBI17 | 82 | 655761 | AC011327 | 619 | 1-4926 |
| | | | | | 7254-7384 |
| HPJBI17 | 82 | 655761 | AC023514 | 620 | 1-559 |
| HPJBI89 | 83 | 655708 | AC006071 | 621 | 1-97 |
| | | | | | 806-944 |
| | | | | | 2874-2923 |
| | | | | | 3012-3124 |
| | | | | | 4930-5376 |
| | | | | | 7132-7248 |
| | | | | | 8149-8301 |
| | | | | | 11085-11487 |
| | | | | | 12690-12774 |
| | | | | | 13247-13392 |
| HPJBI89 | 83 | 655708 | AC002092 | 622 | 1-50 |
| | | | | | 768-905 |
| | | | | | 2835-2884 |
| | | | | | 2973-3083 |
| | | | | | 4894-5636 |
| | | | | | 7096-7212 |
| | | | | | 8116-8253 |
| HPJBI89 | 83 | 655708 | AC006071 | 623 | 1-676 |
| HPJBK52 | 84 | 655751 | AC026458 | 624 | 1-635 |
| HPJBK52 | 84 | 655751 | AC026957 | 625 | 1-519 |
| HPJBK52 | 84 | 655751 | AC068974 | 626 | 1-638 |
| HPJBK52 | 84 | 655751 | AC022770 | 627 | 1-638 |
| HPJBK52 | 84 | 655751 | AF271408 | 628 | 1-519 |
| HPJBK52 | 84 | 655751 | AC000378 | 629 | 1-636 |
| HPJBK52 | 84 | 655751 | AF165177 | 630 | 1-637 |
| HPJBK52 | 84 | 655751 | AF284563 | 631 | 1-438 |
| HPJBK52 | 84 | 655751 | AC026957 | 632 | 1-1148 |
| HPJBK52 | 84 | 655751 | AC068974 | 633 | 1-170 |
| HPJBK52 | 84 | 655751 | AC068974 | 634 | 1-674 |
| HPJBK52 | 84 | 655751 | AC022770 | 635 | 1-632 |
| HPJBK52 | 84 | 655751 | AF271408 | 636 | 1-512 |
| HPJBK52 | 84 | 655751 | AC000378 | 637 | 1-336 |
| HPJBK52 | 84 | 655751 | AF165177 | 638 | 1-666 |
| HPJBK52 | 84 | 655751 | AF284563 | 639 | 1-672 |
| HPJBU08 | 85 | 958979 | AC034223 | 640 | 1-365 |
| HPJBU08 | 85 | 958979 | AC025459 | 641 | 1-365 |
| HPJBU08 | 85 | 958979 | AC034223 | 642 | 1-470 |
| HPJBU08 | 85 | 958979 | AC025459 | 643 | 1-470 |
| HPJBV17 | 86 | 655729 | AC007394 | 644 | 1-300 |
| HPJCC04 | 87 | 926787 | AC020746 | 645 | 1-402 |
| HPJCC04 | 87 | 926787 | AC020746 | 646 | 1-137 |
| | | | | | 996-1100 |
| HPJCC04 | 87 | 926787 | AC020746 | 647 | 1-305 |
| HPJCP10 | 88 | 964259 | AC010384 | 648 | 1-482 |
| HPJCP10 | 88 | 964259 | AC010471 | 649 | 1-482 |
| HPJCP10 | 88 | 964259 | AL161724 | 650 | 1-482 |
| HPJCX26 | 91 | 655600 | AL354668 | 651 | 1-350 |
| HPJCY70 | 92 | 655569 | AC073576 | 652 | 1-378 |
| HPJCY70 | 92 | 655569 | AL355916 | 653 | 1-378 |
| HPJCZ03 | 93 | 922850 | AC019301 | 654 | 1-322 |
| HPJCZ03 | 93 | 922850 | AC019301 | 655 | 1-115 |
| HPJCZ03 | 93 | 922850 | AC019301 | 656 | 1-117 |
| HPJCZ06 | 94 | 934170 | AC012101 | 657 | 1-434 |
| HPJCZ06 | 94 | 934170 | AC012101 | 658 | 1-261 |
| HPJDX94 | 97 | 838748 | AC027752 | 659 | 1-385 |
| HPJDX94 | 97 | 838748 | AC024033 | 660 | 1-385 |
| HPJEI55 | 98 | 926815 | AC012141 | 661 | 1-464 |
| HPJEI55 | 98 | 926815 | AL138843 | 662 | 1-464 |
| HPJEI55 | 98 | 926815 | AL138787 | 663 | 1-464 |
| HPJEI55 | 98 | 926815 | AC012141 | 664 | 1-643 |
| HPJEI55 | 98 | 926815 | AL138843 | 665 | 1-206 |
| | | | | | 2313-2650 |
| | | | | | 3456-4431 |
| HPJEI55 | 98 | 926815 | AC012141 | 666 | 1-976 |
| HPJEI55 | 98 | 926815 | AL138843 | 667 | 1-643 |
| HPJEI55 | 98 | 926815 | AL138787 | 668 | 1-206 |
| | | | | | 2313-2650 |
| | | | | | 3456-4433 |
| HPJEI55 | 98 | 926815 | AL138787 | 669 | 1-643 |
| HPJEJ39 | 99 | 930988 | AL162551 | 670 | 1-605 |
| HPJEJ39 | 99 | 930988 | AL121576 | 671 | 1-605 |
| HPJEQ22 | 100 | 867725 | AC021715 | 672 | 1-639 |
| HPJEQ22 | 100 | 867725 | AL163052 | 673 | 1-639 |
| HPJEV06 | 102 | 934096 | AP000773 | 674 | 1-769 |
| HPJEV06 | 102 | 934096 | AC018708 | 675 | 1-768 |
| HPJEV06 | 102 | 934096 | AC011207 | 676 | 1-768 |
| HPJEV06 | 102 | 934096 | AP000773 | 677 | 1-495 |
| | | | | | 909-997 |
| | | | | | 1276-1446 |
| HPJEV06 | 102 | 934096 | AC018708 | 678 | 1-409 |
| HPJEV06 | 102 | 934096 | AP000773 | 679 | 1-409 |
| HPJEV06 | 102 | 934096 | AC018708 | 680 | 1-495 |
| | | | | | 909-997 |
| | | | | | 1276-1446 |
| HPJEV06 | 102 | 934096 | AC011207 | 681 | 1-409 |
| HPJEV06 | 102 | 934096 | AC011207 | 682 | 1-495 |
| | | | | | 909-997 |
| | | | | | 1276-1446 |
| HPZAB38 | 104 | 655591 | AC008954 | 683 | 1-263 |
| HPZAB38 | 104 | 655591 | AC026707 | 684 | 1-263 |
| HPZAB38 | 104 | 655591 | AC008971 | 685 | 1-263 |
| HPZAB38 | 104 | 655591 | AC026707 | 686 | 1-186 |
| HPZAB38 | 104 | 655591 | AC008971 | 687 | 1-180 |
| HPJFA10 | 106 | 963322 | AC009299 | 688 | 1-607 |
| HPJFA10 | 106 | 963322 | AC009299 | 689 | 1-465 |
| HPJFA10 | 106 | 963322 | AC009299 | 690 | 1-475 |
| HPJEV95 | 107 | 929723 | AL359456 | 691 | 1-711 |
| HPJEV95 | 107 | 929723 | AL390724 | 692 | 1-633 |
| HPJEV95 | 107 | 929723 | AL390724 | 693 | 1-368 |
| HPJEV95 | 107 | 929723 | AL359456 | 694 | 1-1365 |
| HPJET11 | 109 | 965894 | AP001270 | 695 | 1-961 |
| HPJET11 | 109 | 965894 | AP001270 | 696 | 1-344 |
| HPJET11 | 109 | 965894 | AP001270 | 697 | 1-427 |
| HPJES17 | 110 | 859867 | AP001857 | 698 | 1-444 |
| HPJES17 | 110 | 859867 | AC015703 | 699 | 1-414 |
| HPJES17 | 110 | 859867 | AP001857 | 700 | 1-54 |
| | | | | | 1030-1290 |
| HPJEL02 | 111 | 918315 | AC025014 | 701 | 1-1195 |
| | | | | | 1827-2531 |
| | | | | | 4783-5133 |
| | | | | | 5139-5379 |
| | | | | | 5902-6081 |
| | | | | | 6463-7267 |
| | | | | | 7466-7724 |
| | | | | | 8041-8216 |
| | | | | | 8269-9037 |
| | | | | | 9310-10364 |
| | | | | | 10545-10988 |
| | | | | | 11353-12100 |
| HPJEL02 | 111 | 918315 | AC011850 | 702 | 1-416 |
| | | | | | 1048-1381 |
| | | | | | 4025-4374 |
| | | | | | 4380-4621 |
| | | | | | 5927-6305 |
| HPJEL02 | 111 | 918315 | AC011850 | 703 | 1-3-34 |
| HPJEL02 | 111 | 918315 | AC020590 | 704 | 1-397 |
| HPJEL02 | 111 | 918315 | AL162451 | 705 | 1-416 |
| | | | | | 1052-1446 |
| | | | | | 2106-2304 |
| | | | | | 4264-4614 |
| | | | | | 4620-4861 |
| | | | | | 5947-6495 |
| HPJEL02 | 111 | 918315 | AC012661 | 706 | 1-396 |
| HPJEL02 | 111 | 918315 | AC011850 | 707 | 1-660 |
| HPJEL02 | 111 | 918315 | AC025014 | 708 | 1-1181 |
| HPJEL02 | 111 | 918315 | AC011850 | 709 | 1-247 |
| HPJEL02 | 111 | 918315 | AL162451 | 710 | 1-249 |
| HPJEL02 | 111 | 918315 | AC020590 | 711 | 1-659 |
| HPJEL02 | 111 | 918315 | AC012661 | 712 | 1-486 |
| HPJEG53 | 112 | 974074 | AC006137 | 713 | 1-508 |
| HPJEG53 | 112 | 974074 | AL050328 | 714 | 1-508 |
| HPJEG53 | 112 | 974074 | AC006137 | 715 | 1-266 |
| | | | | | 1353-1457 |
| | | | | | 1654-1954 |
| HPJEG53 | 112 | 974074 | AL050328 | 716 | 1-323 |
| | | | | | 1647-1959 |
| HPJDT03 | 114 | 922815 | AC009143 | 717 | 1-459 |
| HPJDT03 | 114 | 922815 | AC009123 | 718 | 1-459 |
| | | | | | 3173-3221 |
| | | | | | 5754-6155 |
| HPJDP54 | 115 | 949149 | AC022608 | 719 | 1-531 |
| HPJDP54 | 115 | 949149 | AC021472 | 720 | 1-531 |
| HPJDP54 | 115 | 949149 | AC069078 | 721 | 1-531 |
| HPJDP54 | 115 | 949149 | AC022608 | 722 | 1-301 |
| HPJDP54 | 115 | 949149 | AC022608 | 723 | 1-537 |
| HPJDP54 | 115 | 949149 | AC021472 | 724 | 1-1124 |
| HPJDP54 | 115 | 949149 | AC021472 | 725 | 1-301 |
| HPJDP54 | 115 | 949149 | AC069078 | 726 | 1-1124 |
| HPJDP54 | 115 | 949149 | AC069078 | 727 | 1-301 |
| HPJDC01 | 117 | 915056 | AL357517 | 728 | 1-607 |
| HPJDC01 | 117 | 915056 | AL356792 | 729 | 1-607 |
| HPJDC01 | 117 | 915056 | AL357517 | 730 | 1-532 |
| HPJDC01 | 117 | 915056 | AL357517 | 731 | 1-221 |
| HPJDC01 | 117 | 915056 | AL356792 | 732 | 1-532 |
| HPJDC01 | 117 | 915056 | AL356792 | 733 | 1-221 |
| HPJCT81 | 120 | 494874 | AC068243 | 734 | 1-652 |
| HPJCT81 | 120 | 494874 | AC068243 | 735 | 1-119 |
| HPJCT81 | 120 | 494874 | AC068243 | 736 | 1-420 |
| HPJCT26 | 121 | 559949 | AC022064 | 737 | 1-130 |
| | | | | | 781-1384 |
| | | | | | 3527-3569 |
| HPJCT26 | 121 | 559949 | AC022064 | 738 | 1-198 |
| HPJCS73 | 122 | 975087 | AC008013 | 739 | 1-751 |
| | | | | | 869-1288 |
| | | | | | 1741-2134 |
| | | | | | 3713-4192 |
| | | | | | 4219-4525 |
| | | | | | 5032-5188 |
| | | | | | 6221-6459 |
| | | | | | 7627-7887 |
| | | | | | 8458-9081 |
| | | | | | 9227-9966 |
| | | | | | 10464-10713 |
| | | | | | 11232-11320 |
| | | | | | 11620-11777 |
| | | | | | 11791-12453 |
| | | | | | 12643-13059 |
| | | | | | 14536-14632 |
| | | | | | 15693-16508 |
| | | | | | 16536-17099 |
| | | | | | 17433-17823 |
| | | | | | 18365-18520 |
| | | | | | 19494-19542 |
| | | | | | 19895-20386 |
| | | | | | 20452-21075 |
| | | | | | 21128-21475 |
| | | | | | 22370-22928 |
| | | | | | 22994-23030 |
| HPJCS73 | 122 | 975087 | AC009533 | 740 | 1-221 |
| | | | | | 367-759 |
| | | | | | 1212-1606 |
| | | | | | 3182-3992 |
| | | | | | 4509-4666 |
| | | | | | 4820-4982 |
| | | | | | 5711-5948 |
| | | | | | 7122-7382 |
| | | | | | 7953-8576 |
| | | | | | 8722-9484 |
| | | | | | 9977-10227 |
| | | | | | 10746-10834 |
| | | | | | 11133-11288 |
| | | | | | 11304-11966 |
| | | | | | 12156-12572 |
| | | | | | 14044-14140 |
| | | | | | 14735-15547 |
| | | | | | 15575-16138 |
| | | | | | 16472-16862 |
| | | | | | 17405-17560 |
| | | | | | 18541-18589 |
| | | | | | 18938-19448 |
| | | | | | 20178-20525 |
| | | | | | 21420-21971 |
| | | | | | 22037-22073 |
| | | | | | 22331-22434 |
| | | | | | 22548-22685 |
| | | | | | 22842-23316 |
| | | | | | 23334-23726 |
| | | | | | 25414-26133 |
| | | | | | 26228-26338 |
| | | | | | 26375-26622 |
| | | | | | 26657-26756 |
| | | | | | 27017-27239 |
| | | | | | 27287-27340 |
| | | | | | 27456-27676 |
| | | | | | 27850-28149 |
| | | | | | 28593-28639 |
| | | | | | 28670-29013 |
| | | | | | 29189-29345 |
| | | | | | 29359-30420 |
| HPJCS73 | 122 | 975087 | AC008013 | 741 | 1-294 |
| HPJCS73 | 122 | 975087 | AC008013 | 742 | 1-106 |
| | | | | | 220-357 |
| | | | | | 575-1050 |
| | | | | | 1060-1459 |
| | | | | | 3153-3870 |
| | | | | | 3965-4359 |
| | | | | | 4392-4496 |
| | | | | | 4756-4977 |
| | | | | | 5025-5078 |
| | | | | | 5198-5418 |
| | | | | | 5593-5895 |
| | | | | | 6301-6763 |
| | | | | | 6941-8173 |
| | | | | | 8913-9547 |
| | | | | | 9927-10355 |
| | | | | | 10651-11058 |
| | | | | | 11461-11749 |
| HPJCS73 | 122 | 975087 | AC009533 | 743 | 1-636 |
| HPJCS32 | 124 | 699046 | AC024922 | 744 | 1-274 |
| HPJCS32 | 124 | 699046 | AC024922 | 745 | 1-274 |
| HPJCL55 | 126 | 670083 | AC068280 | 746 | 1-895 |
| HPJBS35 | 131 | 867818 | AC016276 | 747 | 1-431 |
| HPJBS35 | 131 | 867818 | AC015557 | 748 | 1-436 |
| HPJBS35 | 131 | 867818 | AC015557 | 749 | 1-495 |
| HPJBL76 | 132 | 769889 | AC007066 | 750 | 1-1543 |
| HPJBL76 | 132 | 769889 | AC018466 | 751 | 1-1543 |
| HPJBL76 | 132 | 769889 | AC007066 | 752 | 1-785 |
| HPJBL76 | 132 | 769889 | AC007066 | 753 | 1-1761 |
| HPJBL76 | 132 | 769889 | AC018466 | 754 | 1-1761 |
| HPJBL76 | 132 | 769889 | AC018466 | 755 | 1-785 |
| HPJBK25 | 134 | 974606 | AC005077 | 756 | 1-540 |
| HPJBK25 | 134 | 974606 | AC005077 | 757 | 1-124 |
| HPJBK14 | 135 | 974593 | AC005202 | 758 | 1-604 |
| HPJBK14 | 135 | 974593 | AC005202 | 759 | 1-98 |
| HPJBH45 | 136 | 717088 | AC073089 | 760 | 1-681 |
| HPJBH45 | 136 | 717088 | AC006480 | 761 | 1-681 |
| HPJBH45 | 136 | 717088 | AC073089 | 762 | 1-238 |
| HPJBH45 | 136 | 717088 | AC006480 | 763 | 1-218 |
| HPJBH45 | 136 | 717088 | AC006480 | 764 | 1-493 |
| HPJAU73 | 138 | 806718 | AC011689 | 765 | 1-1216 |
| HPJAU73 | 138 | 806718 | AC078939 | 766 | 1-1496 |
| HPJAU73 | 138 | 806718 | AC011043 | 767 | 1-712 |
| | | | | | 904-1867 |
| | | | | | 1874-1906 |
| | | | | | 2000-2124 |
| | | | | | 337-3891 |
| HPJAU73 | 138 | 806718 | AC011841 | 768 | 1-710 |
| | | | | | 902-1864 |
| | | | | | 1997-2121 |
| | | | | | 2334-3824 |
| | | | | | 4232-5905 |
| HPJAU73 | 138 | 806718 | AC078939 | 769 | 1-646 |
| | | | | | 837-1797 |
| | | | | | 1804-1836 |
| | | | | | 1930-3820 |
| | | | | | 4161-5834 |
| HPJAU73 | 138 | 806718 | AC078939 | 770 | 1-1358 |
| HPJAU73 | 138 | 806718 | AC011043 | 771 | 1-105 |
| HPJAU73 | 138 | 806718 | AC078939 | 772 | 1-906 |
| HPJAU73 | 138 | 806718 | AC011841 | 773 | 1-541 |
| HPJAU73 | 138 | 806718 | AC011841 | 774 | 1-105 |
| HPJAU73 | 138 | 806718 | AC078939 | 775 | 1-564 |
| HPJAU73 | 138 | 806718 | AC078939 | 776 | 1-105 |
| HPJAP92 | 139 | 887830 | AL353687 | 777 | 1-430 |
| HPJAP92 | 139 | 887830 | Z97832 | 778 | 1-430 |
| HPJAP92 | 139 | 887830 | AL353687 | 779 | 1-262 |
| HPJAP92 | 139 | 887830 | Z97832 | 780 | 1-262 |
| HPJAN69 | 141 | 754858 | AC025957 | 781 | 1-345 |
| HPJAN67 | 142 | 751384 | AL139244 | 782 | 1-161 |
| | | | | | 1052-4592 |
| | | | | | 3665-4095 |
| | | | | | 4361-4549 |
| HPJAN67 | 142 | 751384 | AC004962 | 783 | 1-83 |
| | | | | | 719-835 |
| | | | | | 1648-1811 |
| | | | | | 2702-3242 |
| | | | | | 5315-5745 |
| | | | | | 6011-6199 |
| HPJAN67 | 142 | 751384 | AL139244 | 784 | 1-506 |
| HPJAN67 | 142 | 751384 | AC004962 | 785 | 1-1876 |
| HPJAN57 | 143 | 734503 | AC007747 | 786 | 1-433 |
| HPJAN57 | 143 | 734503 | AL158136 | 787 | 1-433 |
| HPJAN57 | 143 | 734503 | AC007747 | 788 | 1-623 |
| HPJAN57 | 143 | 734503 | AL158136 | 789 | 1-623 |
| HPJAJ20 | 144 | 669000 | AP000584 | 790 | 1-564 |
| | | | | | 648-2086 |
| | | | | | 3513-3644 |
| HPJAJ20 | 144 | 669000 | AC011256 | 791 | 1-564 |
| | | | | | 648-2086 |
| | | | | | 3514-3645 |
| HPJAJ20 | 144 | 669000 | AP000588 | 792 | 1-564 |
| | | | | | 648-2086 |
| | | | | | 3513-3644 |
| HPJAJ20 | 144 | 669000 | AP000584 | 793 | 1-386 |
| HPJAJ20 | 144 | 669000 | AC011256 | 794 | 1-386 |
| HPJAJ20 | 144 | 669000 | AP000588 | 795 | 1-386 |
| HPJAE51 | 145 | 725761 | AL353654 | 796 | 1-392 |
| | | | | | 842-1387 |
| HPJAE51 | 145 | 725761 | AC004842 | 797 | 1-392 |
| | | | | | 842-1387 |
| HPJAE51 | 145 | 725761 | AL035696 | 798 | 1-392 |
| | | | | | 842-1387 |
| HPJAE51 | 145 | 725761 | AL353654 | 799 | 1-169 |
| | | | | | 179-295 |
| HPJAE51 | 145 | 725761 | AC004842 | 800 | 1-168 |
| | | | | | 178-294 |
| HPJAE51 | 145 | 725761 | AL035696 | 801 | 1-162 |
| HPJAA27 | 146 | 419786 | AC074007 | 802 | 1-531 |
| HPJAA27 | 146 | 419786 | AL356953 | 803 | 1-531 |
| HPJAA27 | 146 | 419786 | AC018896 | 804 | 1-531 |
| HPICG93 | 147 | 887817 | AL356975 | 805 | 1-447 |
| HPICG93 | 147 | 887817 | AL357812 | 806 | 1-423 |
| HPICE06 | 148 | 935095 | AC007506 | 807 | 1-133 |
| HPICE06 | 148 | 935095 | AC007506 | 808 | 1-623 |
| HPIBT62 | 150 | 743135 | AC068150 | 809 | 1-62 |
| | | | | | 2884-2997 |
| | | | | | 3285-3503 |
| | | | | | 4212-4325 |
| | | | | | 5273-5353 |
| | | | | | 7542-7640 |
| | | | | | 7721-8853 |
| HPIBT62 | 150 | 743135 | AC068150 | 810 | 1-766 |
| HPIBO89 | 151 | 786741 | AL355102 | 811 | 1-98 |
| | | | | | 763-882 |
| | | | | | 1106-1289 |
| | | | | | 1883-2041 |
| | | | | | 2351-2629 |
| | | | | | 3424-3590 |
| | | | | | 4426-4726 |
| | | | | | 5712-8082 |
| HPIBO89 | 151 | 786741 | AL355102 | 812 | 1-101 |
| | | | | | 1847-2078 |
| HPIBO89 | 151 | 786741 | AL355102 | 813 | 1-2260 |
| HPIBI89 | 152 | 867845 | AC009696 | 814 | 1-149 |
| | | | | | 511-650 |
| | | | | | 806-1203 |
| | | | | | 1520-2566 |
| | | | | | 2570-2737 |
| | | | | | 3468-3611 |
| | | | | | 3880-4009 |
| | | | | | 4098-4206 |
| HPIBC93 | 154 | 785971 | Z97630 | 815 | 1-418 |
| | | | | | 2009-2216 |
| | | | | | 2619-2865 |
| | | | | | 3398-3578 |
| | | | | | 4946-5048 |
| | | | | | 5089-5669 |
| | | | | | 7182-7343 |
| | | | | | 7476-7560 |
| | | | | | 7718-7895 |
| | | | | | 7913-8163 |
| | | | | | 8257-8378 |
| | | | | | 8422-8957 |
| HPIBC93 | 154 | 785971 | Z97630 | 816 | 1-2182 |
| HPIBB45 | 155 | 867850 | AL110504 | 817 | 1-5312 |
| HPIBB32 | 157 | 698901 | AC040962 | 818 | 1-323 |
| HPIBB32 | 157 | 698901 | AL161903 | 819 | 1-415 |
| HPIBB32 | 157 | 698901 | AL021366 | 820 | 1-415 |
| HPIBB32 | 157 | 698901 | AL050332 | 821 | 1-415 |
| HPIBB32 | 157 | 698901 | AL161903 | 822 | 1-183 |
| HPIBB32 | 157 | 698901 | AC040962 | 823 | 1-111 |
| HPIBB32 | 157 | 698901 | AL161903 | 824 | 1-111 |
| HPIBB32 | 157 | 698901 | AL021366 | 825 | 1-194 |
| HPIBB32 | 157 | 698901 | AL021366 | 826 | 1-111 |
| HPIBB32 | 157 | 698901 | AL050332 | 827 | 1-111 |
| HPIBB32 | 157 | 698901 | AL050332 | 828 | 1-194 |
| HPIAW91 | 159 | 790033 | AC004200 | 829 | 1-719 |
| HPIAW9I | 159 | 790033 | AC011858 | 830 | 1-719 |
| HPIAW91 | 159 | 790033 | AB023056 | 831 | 1-719 |
| HPIAV06 | 160 | 935111 | AC008542 | 832 | 1-41 |
| | | | | | 499-841 |
| | | | | | 945-1795 |
| | | | | | 1847-2073 |
| | | | | | 2214-2453 |
| | | | | | 3031-3131 |
| | | | | | 3396-4414 |
| | | | | | 4470-5202 |
| | | | | | 5863-6644 |
| | | | | | 7027-7181 |
| | | | | | 7474-7771 |
| | | | | | 7857-8016 |
| | | | | | 8110-8448 |
| HPIAV06 | 160 | 935111 | AC023788 | 833 | 1-71 |
| | | | | | 998-1207 |
| | | | | | 4649-5094 |
| | | | | | 5184-5215 |
| | | | | | 5490-5821 |
| | | | | | 6192-6604 |
| | | | | | 6708-6745 |
| | | | | | 6917-7852 |
| | | | | | 7993-8232 |
| | | | | | 8809-8909 |
| | | | | | 9174-10222 |
| | | | | | 10248-10976 |
| | | | | | 11637-12418 |
| | | | | | 12801-12955 |
| | | | | | 13248-13545 |
| | | | | | 13631-13790 |
| | | | | | 13884-14221 |
| HPIAV06 | 160 | 935111 | AC008404 | 834 | 1-446 |
| | | | | | 537-568 |
| | | | | | 843-1166 |
| | | | | | 1553-1961 |
| | | | | | 2065-2915 |
| | | | | | 2967-3193 |
| | | | | | 3334-3573 |
| | | | | | 4515-5563 |
| | | | | | 5589-6320 |
| | | | | | 6980-7761 |
| | | | | | 8144-8298 |
| | | | | | 8591-8888 |
| | | | | | 8974-9133 |
| | | | | | 9227-9566 |
| HPIAV06 | 160 | 935111 | AC008404 | 835 | 1-393 |
| HPIAV06 | 160 | 935111 | AC023788 | 836 | 1-393 |
| HPIAQ70 | 161 | 973604 | AC008751 | 837 | 1-930 |
| HPFDX38 | 164 | 709302 | AC023631 | 838 | 1-2429 |
| HPFDX38 | 164 | 709302 | AC011962 | 839 | 1-2428 |
| HPFCZ82 | 165 | 780198 | AC048350 | 840 | 1-900 |
| HPFCZ82 | 165 | 780198 | AC037193 | 841 | 1-876 |
| HPFCZ82 | 165 | 780198 | AC008042 | 842 | 1-688 |
| | | | | | 1078-1977 |
| HPFCZ82 | 165 | 780198 | AC037193 | 843 | 1-128 |
| | | | | | 961-991 |
| | | | | | 4864-5402 |
| HPFCZ82 | 165 | 780198 | AC037193 | 844 | 1-688 |
| HPFCZ60 | 166 | 430125 | AC010611 | 845 | 1-694 |
| HPFCZ60 | 166 | 430125 | AC010255 | 846 | 1-694 |
| HPFCZ60 | 166 | 430125 | AC010611 | 847 | 1-190 |
| HPFCZ60 | 166 | 430125 | AC010255 | 848 | 1-190 |
| HPFCZ10 | 167 | 968360 | AC024493 | 849 | 1-337 |
| HPFCZ10 | 167 | 968360 | AL359983 | 850 | 1-337 |
| HPFCZ10 | 167 | 968360 | AL357555 | 851 | 1-337 |
| HPFCP53 | 170 | 526574 | AC023329 | 852 | 1-101 |
| HPFCP53 | 170 | 526574 | AC069380 | 853 | 1-238 |
| HPFCP53 | 170 | 526574 | AL162583 | 854 | 1-130 |
| HPFCL56 | 173 | 732601 | AC027270 855 | 1-154 | |
| | | | | | 744-867 |
| | | | | | 1696-1817 |
| | | | | | 1958-2117 |
| | | | | | 2143-2244 |
| | | | | | 3812-3907 |
| | | | | | 4266-4379 |
| | | | | | 4520-4734 |
| | | | | | 4822-4936 |
| | | | | | 5686-5748 |
| | | | | | 5820-5952 |
| | | | | | 6060-6191 |
| | | | | | 7271-8847 |
| | | | | | 9423-9518 |
| | | | | | 10087-10163 |
| | | | | | 10751-10891 |
| | | | | | 12158-12252 |
| | | | | | 12330-12717 |
| | | | | | 13997-14286 |
| | | | | | 14515-14846 |
| | | | | | 14946-15228 |
| | | | | | 16306-16744 |
| | | | | | 16881-17380 |
| | | | | | 18392-18826 |
| | | | | | 19323-19437 |
| | | | | | 19503-20654 |
| | | | | | 20746-21268 |
| | | | | | 21327-21815 |
| | | | | | 22145-22695 |
| | | | | | 22742-23675 |
| | | | | | 23977-24173 |
| HPFCL56 | 173 | 732601 | AP002748 | 856 | 1-551 |
| | | | | | 598-1452 |
| HPFCL56 | 173 | 732601 | AC027270 | 857 | 1-154 |
| HPFCL56 | 173 | 732601 | AP002748 | 858 | 1-196 |
| HPFCL56 | 173 | 732601 | AC027270 | 859 | 1-282 |
| HPFCA01 | 176 | 928672 | AC005531 | 860 | 1-873 |
| HPFCA01 | 176 | 928672 | AC073184 | 861 | 1-873 |
| HPFCA01 | 176 | 928672 | AC005531 | 862 | 1-934 |
| HPFCA01 | 176 | 928672 | AC073184 | 863 | 1-934 |
| HPEBT82 | 177 | 524246 | AC018865 | 864 | 1-466 |
| HPEBT82 | 177 | 524246 | AC018865 | 865 | 1-128 |
| HPEBT49 | 181 | 530021 | AC046171 | 866 | 1-373 |
| HPEBT49 | 181 | 530021 | AC046171 | 867 | 1-209 |
| | | | | | 1274-1611 |
| HPEBT49 | 181 | 530021 | AC046171 | 868 | 1-208 |
| HPEBT34 | 182 | 706836 | AC009677 | 869 | 1-360 |
| HPEBT14 | 183 | 535061 | AL358573 | 870 | 1-245 |
| HPEBT14 | 183 | 535061 | AL139113 | 871 | 1-246 |
| HPEBT14 | 183 | 535061 | AL358573 | 872 | 1-576 |
| HPEBT14 | 183 | 535061 | AL139113 | 873 | 1-576 |
| HPEBL08 | 186 | 960240 | AC007684 | 874 | 1-38 |
| | | | | | 2047-2188 |
| | | | | | 2599-2984 |
| | | | | | 3134-4018 |
| | | | | | 4336-4377 |
| | | | | | 4685-4800 |
| | | | | | 6534-6618 |
| | | | | | 8404-8480 |
| | | | | | 8739-8851 |
| | | | | | 12237-12815 |
| | | | | | 14345-14412 |
| | | | | | 14489-14605 |
| | | | | | 15097-15445 |
| | | | | | 15469-15664 |
| | | | | | 16908-17608 |
| | | | | | 13139-18250 |
| | | | | | 19641-19696 |
| HPEBL08 | 186 | 960240 | AC007684 | 875 | 1-1190 |
| HPEBL08 | 186 | 960240 | AC007684 | 876 | 1-394 |
| | | | | | 429-990 |
| | | | | | 1194-1451 |
| HPEBG10 | 189 | 867888 | AL356133 | 877 | 1-293 |
| HPEBG10 | 189 | 867888 | AL356133 | 878 | 1-503 |
| HPEBA61 | 191 | 742251 | AC007036 | 879 | 1-78 |
| HPEBA61 | 191 | 742251 | AC007036 | 880 | 1-225 |
| HPEBA05 | 192 | 928027 | AC026647 | 881 | 1-379 |
| HPEBA05 | 192 | 928027 | AL359754 | 882 | 1-374 |
| | | | | | 1483-1516 |
| HPEBA05 | 192 | 928027 | AL159175 | 883 | 1-374 |
| | | | | | 1483-1516 |
| HPEBA05 | 192 | 928027 | AL359754 | 884 | 1-673 |
| HPEBA05 | 192 | 928027 | AC026647 | 885 | 1-672 |
| HPEBA05 | 192 | 928027 | AL159175 | 886 | 1-673 |
| HPEAA57 | 196 | 514231 | AC018662 | 887 | 1-784 |
| | | | | | 890-1375 |
| | | | | | 1837-2156 |
| | | | | | 2324-2766 |
| | | | | | 3080-3286 |
| | | | | | 4028-4155 |
| | | | | | 4903-5424 |
| | | | | | 5721-6302 |
| | | | | | 6782-7063 |
| | | | | | 7153-7571 |
| | | | | | 7923-8053 |
| | | | | | 1271-11598 |
| HPEAA57 | 196 | 514231 | AC008039 | 888 | 1-784 |
| | | | | | 890-1375 |
| | | | | | 1837-2156 |
| | | | | | 2324-2766 |
| | | | | | 3080-3286 |
| | | | | | 4028-4155 |
| | | | | | 4905-5426 |
| | | | | | 5723-6304 |
| | | | | | 6784-7065 |
| | | | | | 7155-7573 |
| | | | | | 7925-8055 |
| | | | | | 11273-11600 |
| HPEAA57 | 196 | 514231 | AC018662 | 889 | 1-419 |
| HPEAA57 | 196 | 514231 | AC008039 | 890 | 1-418 |
| HL2AD32 | 201 | 699746 | AL390235 | 391 | 1-1176 |
| HL2AD32 | 201 | 699746 | AL359742 | 892 | 1-672 |
| HL2AD32 | 201 | 699746 | AL096773 | 893 | 1-3033 |
| HL2AD32 | 201 | 699746 | AL390235 | 894 | 1-73 |
| | | | | | 1953-2544 |
| | | | | | 2759-2870 |
| | | | | | 3020-3482 |
| | | | | | 4843-6352 |
| HL2AD32 | 201 | 699746 | AL096773 | 895 | 1-518 |
| | | | | | 1341-1514 |
| | | | | | 3365-3956 |
| | | | | | 6254-7763 |
| HLLAN46 | 204 | 522981 | AL137060 | 896 | 1-555 |
| HL1AN46 | 204 | 522981 | AC069475 | 897 | 1-555 |
| HL1AN46 | 204 | 522981 | AL137060 | 898 | 1-826 |
| HL1AN46 | 204 | 522981 | AL137060 | 899 | 1-522 |
| | | | | | 590-2392 |
| HL1AN46 | 204 | 522981 | AC069475 | 900 | 1-826 |
| HL1AN46 | 204 | 522981 | AC069475 | 901 | 1-519 |
| | | | | | 592-970 |
| | | | | | 1168-2400 |
| HBZSG02 | 206 | 920249 | AC008053 | 902 | 1-996 |
| HBZSG02 | 206 | 920249 | AC008053 | 903 | 1-112 |
| HBZSD32 | 207 | 699335 | AC011235 | 904 | 1-354 |
| HBZSD32 | 207 | 699335 | AC011235 | 905 | 1-151 |
| HBZAJ73 | 208 | 764479 | AC073594 | 906 | 1-729 |
| | | | | | 1248-1374 |
| HBZAJ73 | 208 | 764479 | AC068986 | 907 | 1-729 |
| | | | | | 1248-1375 |
| HBZAJ73 | 208 | 764479 | AC010892 | 908 | 1-729 |
| | | | | | 1248-1375 |
| HBZAJ73 | 208 | 764479 | AC073594 | 909 | 1-555 |
| HBZAJ73 | 208 | 764479 | AC068986 | 910 | 1-554 |
| HBZAJ73 | 208 | 764479 | AC010892 | 911 | 1-554 |
| HBZAJ26 | 209 | 681879 | AC036116 | 912 | 1-682 |
| HBZAJ26 | 209 | 681879 | AL358976 | 913 | 1-682 |
| HBZAJ26 | 209 | 681879 | AC036116 | 914 | 1-245 |
| | | | | | 1588-2237 |
| HBZAJ26 | 209 | 681879 | AL358976 | 915 | 1-689 |
| HBZAJ26 | 209 | 681879 | AC036116 | 916 | 1-689 |
| HBZAJ26 | 209 | 681879 | AL358976 | 917 | 1-245 |
| | | | | | 1588-2237 |
| HBZAI39 | 210 | 847621 | AC009036 | 918 | 1-1337 |
| HBZAI39 | 210 | 847621 | AC012320 | 919 | 1-1338 |
| HBZAI39 | 210 | 847621 | AC009036 | 920 | 1-126 |
| HBZAI39 | 210 | 847621 | AC009036 | 921 | 1-104 |
| HBZAI14 | 211 | 847620 | AC073635 | 922 | 1-466 |
| HBZAI14 | 211 | 847620 | AC073635 | 923 | 1-676 |
| HBZAB15 | 212 | 660348 | AC019190 | 924 | 1-894 |
| | | | | | 941-2689 |
| HBZAB15 | 212 | 660348 | AC025171 | 925 | 1-894 |
| | | | | | 941-2485 |
| HBZAB08 | 213 | 959560 | AP002448 | 926 | 1-235 |
| HBZAB08 | 213 | 959560 | AP002448 | 927 | 1-272 |

[0044] Table 1B summarizes additional polynucleotides encompassed by the invention (including cDNA clones related to the sequences (Clone ID NO:Z), contig sequences (contig identifier (Contig ID:) contig nucleotide sequence identifiers (SEQ ID NO:X)), and genomic sequences (SEQ ID NO:B). The first column provides a unique clone identifier, “Clone ID NO:Z”, for a cDNA clone related to each contig sequence. The second column provides the sequence identifier, “SEQ ID NO:X”, for each contig sequence. The third column provides a unique contig identifier, “Contig ID:” for each contig sequence. The fourth column, provides a BAC identifier “BAC ID NO:A” for the BAC clone referenced in the corresponding row of the table. The fifth column provides the nucleotide sequence identifier, “SEQ ID NO:B” for a fragment of the BAC clone identified in column four of the corresponding row of the table. The sixth column, “Exon From-To”, provides the location (i.e., nucleotide position numbers) within the polynucleotide sequence of SEQ ID NO:B which delineate certain polynucleotides of the invention that are also exemplary members of polynucleotide sequences that encode polypeptides of the invention (e.g., polypeptides containing amino acid sequences encoded by the polynucleotide sequences delineated in column six, and fragments and variants thereof).

TABLE 2

| | | SEQ | | | | Score/ | | |
|---|---|---|---|---|---|---|---|---|
| Clone ID | Contig | ID | Analysis | | PFam/NR Accession | Percent | NT | NT |
| NO: Z | ID: | NO: X | Method | PFam/NR Description | Number | Identity | From | To |
| HPFEA08 | 960372 | 63 | HMMER 1.8 | PFAM: HMG (high | PF00505 | 5.1 | 68 | 148 |
| | | | | mobility group) box | | | | |
| HPIAZ37 | 655753 | 70 | HMMER 1.8 | PFAM: ATP synthase A | PF00119 | 11.95 | 68 | 238 |
| | | | | chain | | | | |
| HPIBQ37 | 884289 | 71 | HMMER | PFAM: Immunoglobulin | PF00047 | 42 | 149 | 355 |
| | | | 2.1.1 | domain | | | | |
| | | | blastx | (AF111713) junctional | gb\|AAD42050.1\|AF1 | 100% | 89 | 385 |
| | | | | adhesion molecule [Homo | 11713_1 | 84% | 385 | 423 |
| | | | | sapiens] | | | | |
| HPJCC04 | 926787 | 87 | blastx.14 | (AF159714) PPAR gamma | gi\|5802182\|gb\|AAD5 | 94% | 249 | 40 |
| | | | | coactivator-1 [Homo | 1615.1\|AF159714_1 | | | |
| | | | | sapiens] | | | | |
| HPJDA08 | 958182 | 95 | blastx.14 | zinc finger 5 protein | gi\|1399185\|gb\|AAB3 | 39% | 92 | 475 |
| | | | | [Gallus gallus] | 8387.1\| | | | |
| HPJET90 | 836503 | 101 | HMMER | PFAM: Aldehyde | PF00171 | 150.4 | 66 | 371 |
| | | | 2.1.1 | dehydrogenase family | | | | |
| HPWTA06 | 936026 | 105 | blastx.14 | Collagenase precursor (EC | gi\|1742347\|dbj\|BAA1 | 100% | 624 | 454 |
| | | | | 3.4.-.-). [Escherichia coli] | 5068.1\| | 100% | 359 | 207 |
| | | | | | | 100% | 457 | 362 |
| | | | | | | 58% | 216 | 115 |
| | | | | | | 64% | 169 | 86 |
| HPJEV95 | 929723 | 107 | HMMER 1.8 | PFAM: ATP synthase A | PF00119 | 20.61 | 169 | 393 |
| | | | | chain | | | | |
| HPJDT03 | 922815 | 114 | HMMER 1.8 | PFAM: WW/rsp5/WWP | PF00397 | 9.71 | 294 | 371 |
| | | | | domain containing proteins | | | | |
| HPJDA25 | 951281 | 118 | blastx.2 | (AF047690) ATP-binding | gb\|AAD15748.1\| | 73% | 291 | 488 |
| | | | | cassette protein M-ABC1 | | | | |
| | | | | [Homo sapiens] | | | | |
| HPJDA25 | 951284 | 214 | blastx.14 | (AF047690) ATP-binding | gi\|4321407\|gb\|AAD1 | 87% | 219 | 97 |
| | | | | cassette protein M-ABC1 | 5748.1\| | | | |
| | | | | [Homo sapiens] | | | | |
| HPIAQ70 | 973604 | 161 | HMMER 1.8 | PFAM: Flagella basal body | PF00460 | 41.51 | 206 | 298 |
| | | | | rod proteins | | | | |
| | | | blastx.14 | Flagellar hook-associated | gi\|1651528\|dbj\|BAA3 | 77% | 322 | 498 |
| | | | | protein 1 (hap1) | 5891.1\| | 100% | 194 | 322 |
| | | | | [Escherichia coli] | | | | |

[0045] Table 2 further characterizes certain encoded polypeptides of the invention, by providing the results of comparisons to protein and protein family databases. The first column provides a unique clone identifier, “Clone ID NO:”, corresponding to a cDNA clone disclosed in Table 1A. The second column provides the unique contig indentifier, “Contig ID:” which allows correlation with the information in Table 1A. The third column provides the sequence identifier, “SEQ ID NO:X”, for the contig polynucleotide sequences. The fourth column provides the analysis method by which the homology/identity disclosed in the row was determined. The fifth column provides a description of PFam/NR hits having significant matches identified by each analysis. Column six provides the accession number of the PFam/NR hit disclosed in the fifth column. Column seven, “Score/Percent Identity”, provides a quality score or the percent identity, of the hit disclosed in column five. Comparisons were made between polypeptides encoded by polynucleotides of the invention and a non-redundant protein database (herein referred to as “NR”), or a database of protein families (herein referred to as “PFam”), as described below.

[0046] The NR database, which comprises the NBRF PIR database, the NCBI GenPept database, and the SIB SwissProt and TrEMBL databases, was made non-redundant using the computer program nrdb2 (Warren Gish, Washington University in Saint Louis). Each of the polynucleotides shown in Table 1A, column 3 (e.g., SEQ ID NO:X or the ‘Query’ sequence) was used to search against the NR database. The computer program BLASTX was used to compare a 6-frame translation of the Query sequence to the NR database (for information about the BLASTX algorithm please see Altshul et al., J. Mol., Biol. 215:403-410 (1990), and Gish et al., Nat. Genet. 3:266-272 (1993)). A description of the sequence that is most similar to the Query sequence (the highest scoring ‘Subject’) is shown in column five of Table 2 and the database accession number for that sequence is provided in column six. The highest scoring ‘Subject’ is reported in Table 2 if (a) the estimated probability that the match occurred by chance alone is less than 1.0e-07, and (b) the match was not to a known repetitive element. BLASTX returns alignments of short polypeptide segments of the Query and Subject sequences which share a high degree of similarity; these segments are known as High-Scoring Segment Pairs or HSPs. Table 2 reports the degree of similarity between the Query and the Subject for each HSP as a percent identity in Column 7. The percent identity is determined by dividing the number of exact matches between the two aligned sequences in the HSP, dividing by the number of Query amino acids in the HSP and multiplying by 100. The polynucleotides of SEQ ID NO:X which encode the polypeptide sequence that generates an HSP are delineated by columns 8 and 9 of Table 2.

[0047] The PFam database, PFam version 5.2, (Sonnhammer et al., Nucl. Acids Res., 26:320-322, (1998)) consists of a series of multiple sequence alignments; one alignment for each protein family. Each multiple sequence alignment is converted into a probability model called a Hidden Markov Model, or HMM, that represents the position-specific variation among the sequences that make up the multiple sequence alignment (see, e.g., R. Durbin et al., Biological sequence analysis: probabilistic models of proteins and nucleic acids, Cambridge University Press, 1998 for the theory of HMMs). The program HMMER version 1.8 (Sean Eddy, Washington University in Saint Louis) was used to compare the predicted protein sequence for each Query sequence (SEQ ID NO:Y in Table 1A) to each of the HMMs derived from PFam version 5.2. A HMM derived from PFam version 5.2 was said to be a significant match to a polypeptide of the invention if the score returned by HMMER 1.8 was greater than 0.8 times the HMMER 1.8 score obtained with the most distantly related known member of that protein family. The description of the PFam family which shares a significant match with a polypeptide of the invention is listed in column 5 of Table 2, and the database accession number of the PFam hit is provided in column 6. Column 7 provides the score returned by HMMER version 1.8 for the alignment. Columns 8 and 9 delineate the polynucleotides of SEQ ID NO:X which encode the polypeptide sequence which shows a significant match to a PFam protein family.

[0048] As mentioned, columns 8 and 9 in Table 2, “NT From” and “NT To”, delineate the polynucleotides of “SEQ ID NO:X” that encode a polypeptide having a significant match to the PFam/NR database as disclosed in the fifth column of Table 2. In one embodiment, the invention provides a protein comprising, or alternatively consisting of, a polypeptide encoded by the polynucleotides of SEQ ID NO:X delineated in columns 8 and 9 of Table 2. Also provided are polynucleotides encoding such proteins, and the complementary strand thereto.

[0049] The nucleotide sequence SEQ ID NO:X and the translated SEQ ID NO:Y are sufficiently accurate and otherwise suitable for a variety of uses well known in the art and described further below. For instance, the nucleotide sequences of SEQ ID NO:X are useful for designing nucleic acid hybridization probes that will detect nucleic acid sequences contained in SEQ ID NO:X or the cDNA contained in Clone ID NO:Z. These probes will also hybridize to nucleic acid molecules in biological samples, thereby enabling immediate applications in chromosome mapping, linkage analysis, tissue identification and/or typing, and a variety of forensic and diagnostic methods of the invention. Similarly, polypeptides identified from SEQ ID NO:Y may be used to generate antibodies which bind specifically to these polypeptides, or fragments thereof, and/or to the polypeptides encoded by the cDNA clones identified in, for example, Table 1A.

[0050] Nevertheless, DNA sequences generated by sequencing reactions can contain sequencing errors. The errors exist as misidentified nucleotides, or as insertions or deletions of nucleotides in the generated DNA sequence. The erroneously inserted or deleted nucleotides cause frame shifts in the reading frames of the predicted amino acid sequence. In these cases, the predicted amino acid sequence diverges from the actual amino acid sequence, even though the generated DNA sequence may be greater than 99.9% identical to the actual DNA sequence (for example, one base insertion or deletion in an open reading frame of over 1000 bases).

[0051] Accordingly, for those applications requiring precision in the nucleotide sequence or the amino acid sequence, the present invention provides not only the generated nucleotide sequence identified as SEQ ID NO:X, and a predicted translated amino acid sequence identified as SEQ ID NO:Y, but also a sample of plasmid DNA containing cDNA Clone ID NO:Z (deposited with the ATCC on Oct. 5, 2000, and receiving ATCC designation numbers PTA 2574 and PTA 2575; deposited with the ATCC on Jan. 5, 2001, having the depositor reference numbers TS-1, TS-2, AC-1, and AC-2; and/or as set forth, for example, in Table 1A, 6 and 7). The nucleotide sequence of each deposited clone can readily be determined by sequencing the deposited clone in accordance with known methods. Further, techniques known in the art can be used to verify the nucleotide sequences of SEQ ID NO:X.

[0052] The predicted amino acid sequence can then be verified from such deposits. Moreover, the amino acid sequence of the protein encoded by a particular clone can also be directly determined by peptide sequencing or by expressing the protein in a suitable host cell containing the deposited human cDNA, collecting the protein, and determining its sequence.

### RACE Protocol for Recovery of Full-Length Genes

[0053] Partial cDNA clones can be made full-length by utilizing the rapid amplification of cDNA ends (RACE) procedure described in Frohman, M. A., et al., Proc. Nat'l. Acad. Sci. USA, 85:8998-9002 (1988). A cDNA clone missing either the 5′ or 3′ end can be reconstructed to include the absent base pairs extending to the translational start or stop codon, respectively. In some cases, cDNAs are missing the start codon of translation. The following briefly describes a modification of this original 5′ RACE procedure. Poly A+ or total RNA is reverse transcribed with Superscript II (Gibco/BRL) and an antisense or complementary primer specific to the cDNA sequence. The primer is removed from the reaction with a Microcon Concentrator (Amicon). The first-strand cDNA is then tailed with dATP and terminal deoxynucleotide transferase (Gibco/BRL). Thus, an anchor sequence is produced which is needed for PCR amplification. The second strand is synthesized from the dA-tail in PCR buffer, Taq DNA polymerase (Perkin-Elmer Cetus), an oligo-dT primer containing three adjacent restriction sites (XhoI, SalI and ClaI) at the 5′ end and a primer containing just these restriction sites. This double-stranded cDNA is PCR amplified for 40 cycles with the same primers as well as a nested cDNA-specific antisense primer. The PCR products are size-separated on an ethidium bromide-agarose gel and the region of gel containing cDNA products the predicted size of missing protein-coding DNA is removed. cDNA is purified from the agarose with the Magic PCR Prep kit (Promega), restriction digested with XhoI or SalI, and ligated to a plasmid such as pBluescript SKII (Stratagene) at XhoI and EcoRV sites. This DNA is transformed into bacteria and the plasmid clones sequenced to identify the correct protein-coding inserts. Correct 5′ ends are confirmed by comparing this sequence with the putatively identified homologue and overlap with the partial cDNA clone. Similar methods known in the art and/or commercial kits are used to amplify and recover 3′ ends.

[0054] Several quality-controlled kits are commercially available for purchase. Similar reagents and methods to those above are supplied in kit form from Gibco/BRL for both 5′ and 3′ RACE for recovery of full length genes. A second kit is available from Clontech which is a modification of a related technique, SLIC (single-stranded ligation to single-stranded cDNA), developed by Dumas et al., Nucleic Acids Res., 19:5227-32 (1991). The major differences in procedure are that the RNA is alkaline hydrolyzed after reverse transcription and RNA ligase is used to join a restriction site-containing anchor primer to the first-strand cDNA. This obviates the necessity for the dA-tailing reaction which results in a polyT stretch that is difficult to sequence past.

[0055] An alternative to generating 5′ or 3′ cDNA from RNA is to use cDNA library double-stranded DNA. An asymmetric PCR-amplified antisense cDNA strand is synthesized with an antisense cDNA-specific primer and a plasmid-anchored primer. These primers are removed and a symmetric PCR reaction is performed with a nested cDNA-specific antisense primer and the plasmid-anchored primer.

### RNA Ligase Protocol For Generating The 5′ or 3′ End Sequences To Obtain Full Length Genes

[0056] Once a gene of interest is identified, several methods are available for the identification of the 5′ or 3′ portions of the gene which may not be present in the original cDNA plasmid. These methods include, but are not limited to, filter probing, clone enrichment using specific probes and protocols similar and identical to 5′ and 3′ RACE. While the full length gene may be present in the library and can be identified by probing, a useful method for generating the 5′ or 3′ end is to use the existing sequence information from the original cDNA to generate the missing information. A method similar to 5′ RACE is available for generating the missing 5′ end of a desired full-length gene. (This method was published by Fromont-Racine et al., Nucleic Acids Res., 21(7):1683-1684 (1993)). Briefly, a specific RNA oligonucleotide is ligated to the 5′ ends of a population of RNA presumably containing full-length gene RNA transcript. A primer set containing a primer specific to the ligated RNA oligonucleotide and a primer specific to a known sequence of the gene of interest, is used to PCR amplify the 5′ portion of the desired full length gene which may then be sequenced and used to generate the full length gene. This method starts with total RNA isolated from the desired source, poly A RNA may be used but is not a prerequisite for this procedure. The RNA preparation may then be treated with phosphatase if necessary to eliminate 5′ phosphate groups on degraded or damaged RNA, which may interfere with the later RNA ligase step. The phosphatase, if used, is then inactivated and the RNA is treated with tobacco acid pyrophosphatase in order to remove the cap structure present at the 5′ ends of messenger RNAs. This reaction leaves a 5′ phosphate group at the 5′ end of the cap cleaved RNA which can then be ligated to an RNA oligonucleotide using T4 RNA ligase. This modified RNA preparation can then be used as a template for first strand cDNA synthesis using a gene specific oligonucleotide. The first strand synthesis reaction can then be used as a template for PCR amplification of the desired 5′ end using a primer specific to the ligated RNA oligonucleotide and a primer specific to the known sequence of the prostate cancer antigen of interest. The resultant product is then sequenced and analyzed to confirm that the 5′ end sequence belongs to the relevant prostate cancer antigen.

[0057] The present invention also relates to vectors or plasmids, which include such DNA sequences, as well as the use of the DNA sequences. The material deposited with the ATCC (deposited with the ATCC on Oct. 5, 2000, and receiving ATCC designation numbers PTA 2574 and PTA 2575; deposited with the ATCC on Jan. 5, 2001, having the depositor reference numbers TS-1, TS-2, AC-1, and AC-2; and/or as set forth, for example, in Tables 1A, 6 and 7) is a mixture of cDNA clones derived from a variety of human tissue and cloned in either a plasmid vector or a phage vector, as shown, for example, in Table 7. These deposits are referred to as “the deposits” herein. The tissues from which some of the clones were derived are listed in Table 7, and the vector in which the corresponding cDNA is contained is also indicated in Table 7. The deposited material includes cDNA clones corresponding to SEQ ID NO:X described, for example, in Table 1A (Clone ID NO:Z). A clone which is isolatable from the ATCC Deposits by use of a sequence listed as SEQ ID NO:X, may include the entire coding region of a human gene or in other cases such clone may include a substantial portion of the coding region of a human gene. Furthermore, although the sequence listing may in some instances list only a portion of the DNA sequence in a clone included in the ATCC Deposits, it is well within the ability of one skilled in the art to sequence the DNA included in a clone contained in the ATCC Deposits by use of a sequence (or portion thereof) described in, for example Tables 1A or 2 by procedures hereinafter further described, and others apparent to those skilled in the art.

[0058] Also provided in Table 7 is the name of the vector which contains the cDNA clone. Each vector is routinely used in the art. The following additional information is provided for convenience.

[0059] Vectors Lambda Zap (U.S. Pat. Nos. 5,128,256 and 5,286,636), Uni-Zap XR (U.S. Pat. Nos. 5,128,256 and 5,286,636), Zap Express (U.S. Pat. Nos. 5,128,256 and 5,286,636), pBluescript (pBS) (Short, J. M. et al., Nucleic Acids Res. 16:7583-7600 (1988); Alting-Mees, M. A. and Short, J. M., Nucleic Acids Res. 17:9494 (1989)) and pBK (Alting-Mees, M. A. et al., Strategies 5:58-61 (1992)) are commercially available from Stratagene Cloning Systems, Inc., 11011 N. Torrey Pines Road, La Jolla, Calif., 92037. pBS contains an ampicillin resistance gene and pBK contains a neomycin resistance gene. Phagemid pBS may be excised from the Lambda Zap and Uni-Zap XR vectors, and phagemid pBK may be excised from the Zap Express vector. Both phagemids may be transformed into E. coli strain XL-1 Blue, also available from Stratagene.

[0060] Vectors pSport1, pCMVSport 1.0, pCMVSport 2.0 and pCMVSport 3.0, were obtained from Life Technologies, Inc., P.O. Box 6009, Gaithersburg, Md. 20897. All Sport vectors contain an ampicillin resistance gene and may be transformed into E. coli strain DH10B, also available from Life Technologies. See, for instance, Gruber, C. E., et al., Focus 15:59-(1993). Vector lafmid BA (Bento Soares, Columbia University, New York, N.Y.) contains an ampicillin resistance gene and can be transformed into E. coli strain XL-1 Blue. Vector pCR®2.1, which is available from Invitrogen, 1600 Faraday Avenue, Carlsbad, Calif. 92008, contains an ampicillin resistance gene and may be transformed into E. coli strain DH10B, available from Life Technologies. See, for instance, Clark, J. M., Nuc. Acids Res. 16:9677-9686 (1988) and Mead, D. et al., Bio/Technology 9: (1991).

[0061] The present invention also relates to the genes corresponding to SEQ ID NO:X, SEQ ID NO:Y, and/or the deposited clone (Clone ID NO:Z). The corresponding gene can be isolated in accordance with known methods using the sequence information disclosed herein. Such methods include preparing probes or primers from the disclosed sequence and identifying or amplifying the corresponding gene from appropriate sources of genomic material.

[0062] Also provided in the present invention are allelic variants, orthologs, and/or species homologs. Procedures known in the art can be used to obtain full-length genes, allelic variants, splice variants, full-length coding portions, orthologs, and/or species homologs of prostate cancer associated genes corresponding to SEQ ID NO:X or the complement thereof, polypeptides encoded by SEQ ID NO:X or the complement thereof, and/or the cDNA contained in Clone ID NO:Z, using information from the sequences disclosed herein or the clones deposited with the ATCC. For example, allelic variants and/or species homologs may be isolated and identified by making suitable probes or primers from the sequences provided herein and screening a suitable nucleic acid source for allelic variants and/or the desired homologue.

[0063] The polypeptides of the invention can be prepared in any suitable manner. Such polypeptides include isolated naturally occurring polypeptides, recombinantly produced polypeptides, synthetically produced polypeptides, or polypeptides produced by a combination of these methods. Means for preparing such polypeptides are well understood in the art.

[0064] The polypeptides may be in the form of the secreted protein, including the mature form, or may be a part of a larger protein, such as a fusion protein (see below). It is often advantageous to include an additional amino acid sequence which contains secretory or leader sequences, pro-sequences, sequences which aid in purification, such as multiple histidine residues, or an additional sequence for stability during recombinant production.

[0065] The polypeptides of the present invention are preferably provided in an isolated form, and preferably are substantially purified. A recombinantly produced version of a polypeptide, including the secreted polypeptide, can be substantially purified using techniques described herein or otherwise known in the art, such as, for example, by the one-step method described in Smith and Johnson, Gene 67:31-40 (1988). Polypeptides of the invention also can be purified from natural, synthetic or recombinant sources using techniques described herein or otherwise known in the art, such as, for example, antibodies of the invention raised against the prostate cancer polypeptides of the present invention in methods which are well known in the art.

[0066] The present invention provides a polynucleotide comprising, or alternatively consisting of, the nucleic acid sequence of SEQ ID NO:X, and/or the cDNA sequence contained in Clone ID NO:Z. The present invention also provides a polypeptide comprising, or alternatively, consisting of, the polypeptide sequence of SEQ ID NO:Y, a polypeptide encoded by SEQ ID NO:X or a complement thereof, a polypeptide encoded by the cDNA contained in Clone ID NO:Z, and/or the polypeptide sequence encoded by a nucleotide sequence in SEQ ID NO:B as defined in column 6 of Table 1B. Polynucleotides encoding a polypeptide comprising, or alternatively consisting of the polypeptide sequence of SEQ ID NO:Y, a polypeptide encoded by SEQ ID NO:X, a polypeptide encoded by the cDNA contained in Clone ID NO:Z and/or a polypeptide sequence encoded by a nucleotide sequence in SEQ ID NO:B as defined in column 6 of Table 1B are also encompassed by the invention. The present invention further encompasses a polynucleotide comprising, or alternatively consisting of, the complement of the nucleic acid sequence of SEQ ID NO:X, a nucleic acid sequence encoding a polypeptide encoded by the complement of the nucleic acid sequence of SEQ ID NO:X, and/or the cDNA contained in Clone ID NO:Z.

[0067] Moreover, representative examples of polynucleotides of the invention comprise, or alternatively consist of, one, two, three, four, five, six, seven, eight, nine, ten, or more of the sequences delineated in Table 1B column 6, or any combination thereof. Additional, representative examples of polynucleotides of the invention comprise, or alternatively consist of, one, two, three, four, five, six, seven, eight, nine, ten, or more of the complementary strand(s) of the sequences delineated in Table 1B column 6, or any combination thereof. In further embodiments, the above-described polynucleotides of the invention comprise, or alternatively consist of, sequences delineated in Table 1B, column 6, and have a nucleic acid sequence which is different from that of the BAC fragment having the sequence disclosed in SEQ ID NO:B (see Table 1B, column 5). In additional embodiments, the above-described polynucleotides of the invention comprise, or alternatively consist of, sequences delineated in Table 1B, column 6, and have a nucleic acid sequence which is different from that published for the BAC clone identified as BAC ID NO:A (see Table 1B, column 4). In additional embodiments, the above-described polynucleotides of the invention comprise, or alternatively consist of, sequences delineated in Table 1B, column 6, and have a nucleic acid sequence which is different from that contained in the BAC clone identified as BAC ID NO:A (see Table 1B, column 4). Polypeptides encoded by these polynucleotides, other polynucleotides that encode these polypeptides, and antibodies that bind these polypeptides are also encompassed by the invention. Additionally, fragments and variants of the above-described polynucleotides and polypeptides are also encompassed by the invention.

[0068] Further, representative examples of polynucleotides of the invention comprise, or alternatively consist of, one, two, three, four, five, six, seven, eight, nine, ten, or more of the sequences delineated in column 6 of Table 1B which correspond to the same Clone ID NO:Z (see Table 1B, column 1), or any combination thereof. Additional, representative examples of polynucleotides of the invention comprise, or alternatively consist of, one, two, three, four, five, six, seven, eight, nine, ten, or more of the complementary strand(s) of the sequences delineated in column 6 of Table 1B which correspond to the same Clone ID NO:Z (see Table 1B, column 1), or any combination thereof. In further embodiments, the above-described polynucleotides of the invention comprise, or alternatively consist of, sequences delineated in column 6 of Table 1B which correspond to the same Clone ID NO:Z (see Table 1B, column 1) and have a nucleic acid sequence which is different from that of the BAC fragment having the sequence disclosed in SEQ ID NO:B (see Table 1B, column 5). In additional embodiments, the above-described polynucleotides of the invention comprise, or alternatively consist of, sequences delineated in column 6 of Table 1B which correspond to the same Clone ID NO:Z (see Table 1B, column 1) and have a nucleic acid sequence which is different from that published for the BAC clone identified as BAC ID NO:A (see Table 1B, column 4). In additional embodiments, the above-described polynucleotides of the invention comprise, or alternatively consist of, sequences delineated in column 6 of Table 1B which correspond to the same Clone ID NO:Z (see Table 1B, column 1) and have a nucleic acid sequence which is different from that contained in the BAC clone identified as BAC ID NO:A (see Table 1B, column 4). Polypeptides encoded by these polynucleotides, other polynucleotides that encode these polypeptides, and antibodies that bind these polypeptides are also encompassed by the invention. Additionally, fragments and variants of the above-described polynucleotides and polypeptides are also encompassed by the invention.

[0069] Further, representative examples of polynucleotides of the invention comprise, or alternatively consist of, one, two, three, four, five, six, seven, eight, nine, ten, or more of the sequences delineated in column 6 of Table 1B which correspond to the same contig sequence identifer SEQ ID NO:X (see Table 1B, column 2), or any combination thereof. Additional, representative examples of polynucleotides of the invention comprise, or alternatively consist of, one, two, three, four, five, six, seven, eight, nine, ten, or more of the complementary strand(s) of the sequences delineated in column 6 of Table 1B which correspond to the same contig sequence identifer SEQ ID NO:X (see Table 1B, column 2), or any combination thereof. In further embodiments, the above-described polynucleotides of the invention comprise, or alternatively consist of, sequences delineated in column 6 of Table 1B which correspond to the same contig sequence identifer SEQ ID NO:X (see Table 1B, column 2) and have a nucleic acid sequence which is different from that of the BAC fragment having the sequence disclosed in SEQ ID NO:B (see Table 1B, column 5). In additional embodiments, the above-described polynucleotides of the invention comprise, or alternatively consist of, sequences delineated in column 6 of Table 1B which correspond to the same contig sequence identifer SEQ ID-NO:X (see Table 1B, column 2) and have a nucleic acid sequence which is different from that published for the BAC clone identified as BAC ID NO:A (see Table 1B, column 4). In additional embodiments, the above-described polynucleotides of the invention comprise, or alternatively consist of, sequences delineated in column 6 of Table 1B which correspond to the same contig sequence identifer SEQ ID NO:X (see Table 1B, column 2) and have a nucleic acid sequence which is different from that contained in the BAC clone identified as BAC ID NO:A (See Table 1B, column 4). Polypeptides encoded by these polynucleotides, other polynucleotides that encode these polypeptides, and antibodies that bind these polypeptides are also encompassed by the invention. Additionally, fragments and variants of the above-described polynucleotides and polypeptides are also encompassed by the invention.

[0070] Moreover, representative examples of polynucleotides of the invention comprise, or alternatively consist of, one, two, three, four, five, six, seven, eight, nine, ten, or more of the sequences delineated in the same row of Table 1B column 6, or any combination thereof. Additional, representative examples of polynucleotides of the invention comprise, or alternatively consist of, one, two, three, four, five, six, seven, eight, nine, ten, or more of the complementary strand(s) of the sequences delineated in the same row of Table 1B column 6, or any combination thereof. In preferred embodiments, the polynucleotides of the invention comprise, or alternatively consist of, one, two, three, four, five, six, seven, eight, nine, ten, or more of the complementary strand(s) of the sequences delineated in the same row of Table 1B column 6, wherein sequentially delineated sequences in the table (i.e. corresponding to those exons located closest to each other) are directly contiguous in a 5′ to 3′ orientation. In further embodiments, above-described polynucleotides of the invention comprise, or alternatively consist of, sequences delineated in the same row of Table 1B, column 6, and have a nucleic acid sequence which is different from that of the BAC fragment having the sequence disclosed in SEQ ID NO:B (see Table 1B, column 5). In additional embodiments, the above-described polynucleotides of the invention comprise, or alternatively consist of, sequences delineated in the same row of Table 1B, column 6, and have a nucleic acid sequence which is different from that published for the BAC clone identified as BAC ID NO:A (see Table 1B, column 4). In additional embodiments, the above-described polynucleotides of the invention comprise, or alternatively consist of, sequences delineated in the same row of Table 1B, column 6, and have a nucleic acid sequence which is different from that contained in the BAC clone identified as BAC ID NO:A (see Table 1B, column 4). Polypeptides encoded by these polynucleotides, other polynucleotides that encode these polypeptides, and antibodies that bind these polypeptides are also encompassed by the invention.

[0071] In additional specific embodiments, polynucleotides of the invention comprise, or alternatively consist of, one, two, three, four, five, six, seven, eight, nine, ten, or more of the sequences delineated in column 6 of Table 1B, and the polynucleotide sequence of SEQ ID NO:X (e.g., as defined in Table 1B, column 2) or fragments or variants thereof. Polypeptides encoded by these polynucleotides, other polynucleotides that encode these polypeptides, and antibodies that bind these polypeptides are also encompassed by the invention.

[0072] In additional specific embodiments, polynucleotides of the invention comprise, or alternatively consist of, one, two, three, four, five, six, seven, eight, nine, ten, or more of the sequences delineated in column 6 of Table 1B which correspond to the same Clone ID NO:Z (see Table 1B, column 1), and the polynucleotide sequence of SEQ ID NO:X (e.g., as defined in Table 1A or 1B) or fragments or variants thereof. In preferred embodiments, the delineated sequence(s) and polynucleotide sequence of SEQ ID NO:X correspond to the same Clone ID NO:Z. Polypeptides encoded by these polynucleotides, other polynucleotides that encode these polypeptides, and antibodies that bind these polypeptides are also encompassed by the invention.

[0073] In further specific embodiments, polynucleotides of the invention comprise, or alternatively consist of, one, two, three, four, five, six, seven, eight, nine, ten, or more of the sequences delineated in the same row of column 6 of Table 1B, and the polynucleotide sequence of SEQ ID NO:X (e.g., as defined in Table 1A or 1B) or fragments or variants thereof. In preferred embodiments, the delineated sequence(s) and polynucleotide sequence of SEQ ID NO:X correspond to the same row of column 6 of Table 1B. Polypeptides encoded by these polynucleotides, other polynucleotides that encode these polypeptides, and antibodies that bind these polypeptides are also encompassed by the invention.

[0074] In additional specific embodiments, polynucleotides of the invention comprise, or alternatively consist of a polynucleotide sequence in which the 3′ 10 polynucleotides of one of the sequences delineated in column 6 of Table 1B and the 5′ 10 polynucleotides of the sequence of SEQ ID NO:X are directly contiguous. Nucleic acids which hybridize to the complement of these 20 contiguous polynucleotides under stringent hybridization conditions or alternatively, under lower stringency conditions, are also encompassed by the invention. Polypeptides encoded by these polynucleotides and/or nucleic acids, other polynucleotides and/or nucleic acids that encode these polypeptides, and antibodies that bind these polypeptides are also encompassed by the invention. Additionally, fragments and variants of the above-described polynucleotides, nucleic acids, and polypeptides are also encompassed by the invention.

[0075] In additional specific embodiments, polynucleotides of the invention comprise, or alternatively consist of, a polynucleotide sequence in which the 3′ 10 polynucleotides of one of the sequences delineated in column 6 of Table 1B and the 5′ 10 polynucleotides of a fragment or variant of the sequence of SEQ ID NO:X are directly contiguous Nucleic acids which hybridize to the complement of these 20 contiguous polynucleotides under stringent hybridization conditions or alternatively, under lower stringency conditions, are also encompassed by the invention. Polypeptides encoded by these polynucleotides and/or nucleic acids, other polynucleotides and/or nucleic acids encoding these polypeptides, and antibodies that bind these polypeptides are also encompassed by the invention. Additionally, fragments and variants of the above-described polynucleotides, nucleic acids, and polypeptides are also encompassed by the invention.

[0076] In specific embodiments, polynucleotides of the invention comprise, or alternatively consist of, a polynucleotide sequence in which the 3′ 10 polynucleotides of the sequence of SEQ ID NO:X and the 5′ 10 polynucleotides of the sequence of one of the sequences delineated in column 6 of Table 1B are directly contiguous. Nucleic acids which hybridize to the complement of these 20 contiguous polynucleotides under stringent hybridization conditions or alternatively, under lower stringency conditions, are also encompassed by the invention. Polypeptides encoded by these polynucleotides and/or nucleic acids, other polynucleotides and/or nucleic acids encoding these polypeptides, and antibodies that bind these polypeptides are also encompassed by the invention. Additionally, fragments and variants of the above-described polynucleotides, nucleic acids, and polypeptides are also encompassed by the invention.

[0077] In specific embodiments, polynucleotides of the invention comprise, or alternatively consist of, a polynucleotide sequence in which the 3′ 10 polynucleotides of a fragment or variant of the sequence of SEQ ID NO:X and the 5′ 10 polynucleotides of the sequence of one of the sequences delineated in column 6 of Table 1B are directly contiguous. Nucleic acids which hybridize to the complement of these 20 contiguous polynucleotides under stringent hybridization conditions or alternatively, under lower stringency conditions, are also encompassed by the invention. Polypeptides encoded by these polynucleotides and/or nucleic acids, other polynucleotides and/or nucleic acids encoding these polypeptides, and antibodies that bind these polypeptides are also encompassed by the invention. Additionally, fragments and variants of the above-described polynucleotides, nucleic acids, and polypeptides, are also encompassed by the invention.

[0078] In further specific embodiments, polynucleotides of the invention comprise, or alternatively consist of, a polynucleotide sequence in which the 3′ 10 polynucleotides of one of the sequences delineated in column 6 of Table 1B and the 5′ 10 polynucleotides of another sequence in column 6 are directly contiguous. Nucleic acids which hybridize to the complement of these 20 contiguous polynucleotides under stringent hybridization conditions or alternatively, under lower stringency conditions, are also encompassed by the invention. Polypeptides encoded by these polynucleotides and/or nucleic acids, other polynucleotides and/or nucleic acids encoding these polypeptides, and antibodies that bind these polypeptides are also encompassed by the invention. Additionally, fragments and variants of the above-described polynucleotides, nucleic acids, and polypeptides are also encompassed by the invention.

[0079] In specific embodiments, polynucleotides of the invention comprise, or alternatively consist of, a polynucleotide sequence in which the 3′ 10 polynucleotides of one of the sequences delineated in column 6 of Table 1B and the 5′ 10 polynucleotides of another sequence in column 6 corresponding to the same Clone ID NO:Z (see Table 1B, column 1) are directly contiguous. Nucleic acids which hybridize to the complement of these 20 lower stringency conditions, are also encompassed by the invention. Polypeptides encoded by these polynucleotides and/or nucleic acids, other polynucleotides and/or nucleic acids encoding these polypeptides, and antibodies that bind these polypeptides are also encompassed by the invention. Additionally, fragments and variants of the above-described polynucleotides, nucleic acids, and polypeptides are also encompassed by the invention.

[0080] In specific embodiments, polynucleotides of the invention comprise, or alternatively consist of, a polynucleotide sequence in which the 3′ 10 polynucleotides of one sequence in column 6 corresponding to the same contig sequence identifer SEQ ID NO:X (see Table 1B, column 2) are directly contiguous. Nucleic acids which hybridize to the complement of these 20 contiguous polynucleotides under stringent hybridization conditions or alternatively, under lower stringency conditions, are also encompassed by the invention. Polypeptides encoded by these polynucleotides and/or nucleic acids, other polynucleotides and/or nucleic acids encoding these polypeptides, and antibodies that bind these polypeptides are also encompassed by the invention. Additionally, fragments and variants of the above-described polynucleotides, nucleic acids, and polypeptides are also encompassed by the invention.

[0081] In specific embodiments, polynucleotides of the invention comprise, or alternatively consist of a polynucleotide sequence in which the 3′ 10 polynucleotides of one of the sequences delineated in column 6 of Table 1B and the 5′ 10 polynucleotides of another sequence in column 6 corresponding to the same row are directly contiguous. In preferred embodiments, the 3′ 10 polynucleotides of one of the sequences delineated in column 6 of Table 1B is directly contiguous with the 5′ 10 polynucleotides of the next sequential exon delineated in Table 1B, column 6. Nucleic acids which hybridize to the complement of these 20 contiguous polynucleotides under stringent hybridization conditions or alternatively, under lower stringency conditions, are also encompassed by the invention. Polypeptides encoded by these polynucleotides and/or nucleic acids, other polynucleotides and/or nucleic acids encoding these polypeptides, and antibodies that bind these polypeptides are also encompassed by the invention. Additionally, fragments and variants of the above-described polynucleotides, nucleic acids, and polypeptides are also encompassed by the invention.

[0082] Many polynucleotide sequences, such as EST sequences, are publicly available and accessible through sequence databases and may have been publicly available prior to conception of the present invention. Preferably, such related polynucleotides are specifically excluded from the scope of the present invention. Accordingly, for each contig sequence (SEQ ID NO:X) listed in the third column of Table 1A, preferably excluded are one or more polynucleotides comprising a nucleotide sequence described by the general formula of a−b, where a is any integer between 1 and the final nucleotide minus 15 of SEQ ID NO:X, b is an integer of 15 to the final nucleotide of SEQ ID NO:X, where both a and b correspond to the positions of nucleotide residues shown in SEQ ID NO:X, and where b is greater than or equal to a+14. More specifically, preferably excluded are one or more polynucleotides comprising a nucleotide sequence described by the general formula of a−b, where a and b are integers as defined in columns 4 and 5, respectively, of Table 3. In specific embodiments, the polynucleotides of the invention do not consist of at least one, two, three, four, five, ten, or more of the specific polynucleotide sequences referenced by the Genbank Accession No. as disclosed in column 6 of Table 3 (including for example, published sequence in connection with a particular BAC clone). In further embodiments, preferably excluded from the invention are the specific polynucleotide sequence(s) contained in the clones corresponding to at least one, two, three, four, five, ten, or more of the available material having the accession numbers identified in the sixth column of this Table (including for example, the actual sequence contained in an identified BAC clone). In no way is this listing meant to encompass all of the sequences which may be excluded by the general formula, it is just a representative example. All references available through these accessions are hereby incorporated by reference in their entirety.

TABLE 3

| | SEQ | | | | |
|---|---|---|---|---|---|
| Clone ID | ID | Contig | EST Disclaimer | | |
| NO: Z | NO: X | ID: | Range of a | Range of b | Accession #'s |
| HBZAJ09 | 11 | 655769 | 1-329 | 15-343 | |
| HBZSH16 | 12 | 655619 | 1-384 | 15-398 | |
| HBZSH71 | 13 | 760418 | 1-288 | 15-302 | AI339869, AA669158, AI589895, AI055909, AW131819, AA994746, |
| | | | | | AI055952, AW072134, AA504384, AA588867, AA558699, and AA504125. |
| HBZSI73 | 14 | 655737 | 1-339 | 15-353 | |
| HHLAB29 | 15 | 557871 | 1-310 | 15-324 | AA309211, A95274, A20358, A20357, A99078, A28085, A28084, A75741, |
| | | | | | A39734, E02679, E02104, E02001, E01718, E02003, A20356, A20355, E02102, |
| | | | | | E03550, E02096, E02100, E01997, A58998, E02291, E02292, E02293, E01999, |
| | | | | | E02396, E02327, E02428, E02431, E01693, E01696, AR005163, AR005154, |
| | | | | | AR005157, AR005160, I09250, AR005153, A18722, E01024, A07699, A49695, |
| | | | | | A49696, AR050583, AR050584, E02430, E01148, I09267, I09270, E12527, |
| | | | | | E01503, I09268, I09269, AR005165, A08457, E12523, E02432, A62009, |
| | | | | | E01216, I09252, I09251, E08322, I74623, A08458, AR060673, AR060676, |
| | | | | | E03388, AR002333, A70040, I85513, AR031529, A49428, I58669, AR027099, |
| | | | | | AR060097, E02098, E01563, AR028672, A83180, Z96748, Z96159, I31847, |
| | | | | | I31848, A27169, A27170, and A39929. |
| HL1AJ47 | 16 | 655738 | 1-317 | 15-331 | |
| HL1AJ83 | 17 | 655547 | 1-305 | 15-319 | |
| HL1AN33 | 18 | 655562 | 1-335 | 15-349 | AW195771, AI479045, AW303620, AW184004, AA357749, AA250993, |
| | | | | | A86995, and AC003959. |
| HL1AN45 | 19 | 535125 | 1-221 | 15-235 | Z81367. |
| HL1AN67 | 20 | 655721 | 1-244 | 15-258 | AC006237. |
| HL1AS26 | 21 | 655696 | 1-230 | 15-244 | AA357678, and AA357679. |
| HPEAF19 | 22 | 867892 | 1-291 | 15-305 | |
| HPEBA51 | 23 | 723298 | 1-423 | 15-437 | N69328. |
| HPEBD31 | 24 | 655760 | 1-538 | 15-552 | AA196263. |
| HPFAA06 | 25 | 960801 | 1-429 | 15-443 | AC004111. |
| HPFCA36 | 26 | 524720 | 1-275 | 15-289 | AI798807, AC007065, AF073930, and AF064804. |
| HPFCA71 | 27 | 655596 | 1-351 | 15-365 | |
| HPFCF09 | 28 | 536666 | 1-343 | 15-357 | AA617957, AI168322, AC005886, AC006071, AC006561, AL096791, |
| | | | | | AC004223, AC005670, AC002094, AC005156, AC002300, AC004815, |
| | | | | | AC007308, AP000212, AP000134, AP000030, AC006255, AC004685, |
| | | | | | AL132987, Z93017, AC002425, AL096701, L77570, AL021453, AC004890, |
| | | | | | AL049766, AP000555, Z83840, AC005089, AL049650, AC005756, AC008116, |
| | | | | | Z98941, AL034549, AL109952, Z98036, AL023575, AC002470, AL133445, |
| | | | | | AC007077, AL121658, AC005187, AC007279, AL080243, AC007546, |
| | | | | | AC006962, Z95113, AC005332, AC008372, AL031587, and AL035249. |
| HPFCF24 | 29 | 655744 | 1-398 | 15-412 | |
| HPFCF40 | 30 | 968600 | 1-339 | 15-353 | |
| HPFCF83 | 31 | 781490 | 1-329 | 15-343 | AI749823, R99144, AA302658, AW161459, F24175, AI243793, AW161879, |
| | | | | | AI191343, AA130647, AI679221, AI003797, AA936548, W45457, H24953, |
| | | | | | AC005057, U62293, U63721, AC005829, AC005102, Z97630, AC005229, |
| | | | | | AL049830, AF111168, AL035658, AL132712, Z97054, AP000116, AC006241, |
| | | | | | AC000159, AC002300, AC005747, AB023051, AC009946, AC005323, |
| | | | | | AC006121, AL049692, AC003030, AC007536, AF047825, AL049757, |
| | | | | | AC004253, AC004520, AL109952, AC004030, AL023882, AP000512, U91321, |
| | | | | | AL022313, AF196779, AC020663, M55987, AC004893, Z75407, AF102137, |
| | | | | | AC003665, AC004033, AC002477, AF207550, AC012331, AC007666, |
| | | | | | AF064861, AL049548, Z84480, AC002107, AL030996, AL024507, AC006057, |
| | | | | | AC004841, AL078644, AC005480, AC002310, Z83838, AL022326, AC005332, |
| | | | | | AF165926, AC006061, AC005529, U07561, AC008044, Z95114, X14448, |
| | | | | | AC004522, AL050307, U63834, AC005846, AL035086, AL022322, AC007226, |
| | | | | | AP000065, AC005755, AC005914, AC002115, AC005015, AC002073, |
| | | | | | AC005971, AL031311, AC002350, AC004876, AL022163, Z93930, AC005920, |
| | | | | | AL031295, AC005527, AC016831, AC005105, AC005081, AC004890, |
| | | | | | AC002351, AL049780, AC004560, AL020997, AC006449, AC006251, |
| | | | | | AC008012, AL034379, AC007055, AF001549, AC004475, AL035405, |
| | | | | | AC003682, AC006512, U80017, AC006480, AL035450, AC006285, |
| | | | | | AD000092, AL023803, AL080243, AD000671, AC005409, AC005274, |
| | | | | | AF001550, AC004129, AC002492, Z98950, AC005632, AC007263, U91326, |
| | | | | | AL034555, AC005839, AL031289, Z82203, AC002365, U91323, AL031659, |
| | | | | | AF045555, Z84469, AL022336, AF148808, AC005722, AL049869, AC006948, |
| | | | | | AC003041, AL022316, AC005184, AC007304, AC005874, AF134471, |
| | | | | | AP000502, AP000010, Z86090, AC005182, AC005479, AL031685, AL031393, |
| | | | | | U78027, AL021368, AC007207, AC004815, AC005363, AC002470, Z93017, |
| | | | | | AL021546, AP000553, Z99716, M63543, AC007917, Z95331, AL121754, |
| | | | | | AC002395, AC004884, AC005625, AC004859, L78810, AC007021, L44140, |
| | | | | | AC005399, AL021878, AL034553, AC000691, AL031230, AC006453, |
| | | | | | AC002316, AC004024, AC006211, AP000547, AC006515, AL049569, |
| | | | | | AC002106, and AL031591. |
| HPFCH15 | 32 | 655768 | 1-344 | 15-358 | |
| HPFCH89 | 33 | 655538 | 1-226 | 15-240 | |
| HPFCM41 | 34 | 655736 | 1-356 | 15-370 | |
| HPFCM87 | 35 | 925495 | 1-305 | 15-319 | |
| HPFCN08 | 36 | 960365 | 1-363 | 15-377 | AA651633. |
| HPFCO02 | 37 | 867871 | 1-263 | 15-277 | W85782, AA703530, T99014, and C14044. |
| HPFCO67 | 38 | 867880 | 1-293 | 15-307 | |
| HPFCQ88 | 39 | 655749 | 1-387 | 15-401 | AI821958, AW150896, and AW205057. |
| HPFCR21 | 40 | 655621 | 1-452 | 15-466 | |
| HPFCR82 | 41 | 655533 | 1-389 | 15-403 | |
| HPFCT09 | 42 | 655563 | 1-311 | 15-325 | |
| HPFCT53 | 43 | 974257 | 1-634 | 15-648 | AI525556, AI546855, Z28355, AI526194, AI546999, AI525328, AI556967, |
| | | | | | AI525316, AI541374, Z30131, AA585356, C16300, AI525306, AI541508, |
| | | | | | AA585101, AI541523, AA585439, AI546945, AI546899, AI557799, AI541510, |
| | | | | | AI525431, AI557731, AI557082, AI541013, AI546875, AI557807, AI546828, |
| | | | | | AI541534, AI540967, AI526180, AI541307, AL134524, D61254, AI547039, |
| | | | | | AI541535, AI526140, AI541365, AI526184, AI536138, AI557262, T11028, |
| | | | | | AI540920, AI535660, AI557238, R29445, AI525653, D57491, AI525321, |
| | | | | | AI557796, AA585453, AI557787, AI547071, AI535813, AI526144, AL041197, |
| | | | | | AL040155, AL041346, AA585476, AL041096, AL047012, AL041358, |
| | | | | | AL041277, AL041163, AL041098, AL040621, AL043538, AL041324, |
| | | | | | AL040464, AL044162, AL0410186, AL043496, AL041296, AL041233, |
| | | | | | AI541415, AI541017, AI541514, AL045725, AL041140, T23985, AL040193, |
| | | | | | AI541205, AL043612, R28735, AL040149, AL039915, AI535639, C16305, |
| | | | | | AA585440, AL040463, AI546971, AI525320, AI557084, AL047219, |
| | | | | | AL041227, AL047057, AL047170, AL040119, AL047036, C15189, AL041292, |
| | | | | | AL041051, AL047183, AL040322, AL041131, AL046330, AL041133, |
| | | | | | AL041238, AL041142, AL045817, AL040529, AL040625, AL040510, |
| | | | | | AL043467, AL044186, AL040553, AL044037, AL040091, AL040128, |
| | | | | | AL040168, AL040255, AL040285, AL040342, AL040332, AL040617, |
| | | | | | AL045684, AL040745, AL040370, AL043677, AL046442, AL041159, |
| | | | | | AL041246, AL040839, AL041752, AL043775, AL044165, AL043492, |
| | | | | | AL041602, AL043444, AL045920, AL038838, AL044074, AL041635, |
| | | | | | AL045990, AL040458, AL044199, AL044187, AL040253, AL040263, |
| | | | | | AL040090, AL040294, AL040329, AL040082, AL044272, AL041186, |
| | | | | | AL040444, AL040148, AL041730, AL041523, AL043627, AL043537, |
| | | | | | AL046392, AL041374, AL040052, AL041347, AL043845, AL044529, |
| | | | | | AL039338, AL042135, AL044064, AL039316, AL043923, AL038983, |
| | | | | | AL043814, AL043848, AI526196, AL040576, AL041459, R29177, AL043570, |
| | | | | | AL041577, AL044258, AL044201, AL046850, AL038532, AL040768, |
| | | | | | AL037727, AL045753, AL038761, AL040075, AL046994, AI526187, |
| | | | | | AL040414, AL040571, AL044274, AL046914, AL079878, AL049018, |
| | | | | | AI142134, AI557802, AL045857, AL041278, AL039744, R29218, T41289, |
| | | | | | AL038822, D55233, AL080031, AL046327, AL041168, AL045671, AL049069, |
| | | | | | AI557808, AL040472, AL041955, T18597, AL040238, AA585155, AI541075, |
| | | | | | AI546891, AJ239433, AL045989, AL039360, AI546810, AI541317, AL042096, |
| | | | | | AL079852, AL046147, AI540916, R45895, AI557727, AI541390, AI526073, |
| | | | | | AI525856, AL044125, AA174170, AI541345, D61185, AI557734, AI547006, |
| | | | | | AI557740, AL039643, AA585434, AI557279, Z32822, R28967, D57186, |
| | | | | | AI541517, AI525339, AR038762, X81969, I13349, AR017907, A25909, |
| | | | | | A91965, AR062871, I66485, AR038855, I66487, A85395, A85476, I18895, |
| | | | | | AR008429, AJ244004, AR037157, AJ244005, AC005913, AR062872, |
| | | | | | AR062873, AJ244003, AF082186, U94592, A20702, A20700, A43189, A43188, |
| | | | | | AJ244007, I63120, A98767, A93963, A93964, A98420, A98423, A98432, |
| | | | | | A98436, A98417, A98427, I44681, X83865, A84772, D78345, A84776, |
| | | | | | A84773, A84775, A84774, Y16359, AR054109, AR067731, I15717, I15718, |
| | | | | | Y09813, AR067732, A86792, A58522, A91750, I08396, M28262, I08395, |
| | | | | | A60212, A60209, A60210, A60211, E03627, A18053, I48927, I06859, I84553, |
| | | | | | I84554, I00682, A02712, I49890, A77094, A77095, A81878, A35536, A35537, |
| | | | | | A11623, A11624, E00609, A95051, A02135, A04663, A02136, A04664, |
| | | | | | A18050, A23334, A75888, I70384, A64973, A60111, A23633, E13740, |
| | | | | | AR007512, A11178, E01007, A10361, Z32836, I62368, A11245, A93016, |
| | | | | | AR043601, I03331, A02710, E12615, AR035193, AF149828, E14304, A07700, |
| | | | | | A13392, A13393, AR031488, I13521, I52048, A27396, D50010, AR027100, |
| | | | | | I44531, I28266, A90655, I21869, A92133, I44516, A70040, AR031566, |
| | | | | | E16678, A82653, E16636, A95117, AR038066, A24783, A24782, A58524, |
| | | | | | I01995, A58523, I25027, I08051, I26929, I44515, I26928, I26930, I26927, |
| | | | | | I60241, I60242, A20699, E00696, E00697, E03813, I66482, AR009151, I66483, |
| | | | | | I66484, I66498, I66497, I66496, AR027099, I66486, AR051652, AR051651, |
| | | | | | AF134471, A70872, AJ230935, I05558, AJ230902, A70869, AJ230972, I08389, |
| | | | | | I34294, AC012099, D13509, AC007200, AC006057, AC002045, D13316, |
| | | | | | A22738, AC002037, AC007707, AP000310, AP000116, AJ131757, AP000299, |
| | | | | | AP000045, AP000113, AL049570, AC005944, AP000156, AL096803, |
| | | | | | AP000014, AL035461, AC003009, AL031664, AC005740, AC007860, |
| | | | | | AC004830, AC005874, AB025273, AC005559, AC008039, Z84468, AL022156, |
| | | | | | AC000394, AC004130, AP000252, AL109963, AP000030, AP000212, |
| | | | | | AP000134, AC005630, X55503, U07807, AC004653, AL109956, AC000003, |
| | | | | | Z98272, AC005202, AC004079, AC005476, Z95889, AL080250, AC005284, |
| | | | | | AC005777, AL023694, AL035457, AC009263, AJ006216, AC008545, |
| | | | | | AC005480, AC004148, AC006966, AJ003081, AL035462, AC006208, |
| | | | | | AF207550, AC007993, AC005509, AL050318, AC006011, AC007687, |
| | | | | | AC006312, X99832, U72788, AL009183, AC008967, AL049633, U80017, |
| | | | | | AC003667, Z97055, AC005383, AL049697, and AC006480. |
| HPFCT62 | 44 | 655432 | 1-310 | 15-324 | AA487150, AA486829, AA347969, AA622801, AI078409, AA602906, |
| | | | | | AA084609, AL078621, Z96201, AC005484, AF064861, AC004862, AL021393, |
| | | | | | AP000501, Z97056, AC005244, AL049569, AC005225, AC005318, AC007371, |
| | | | | | AC002477, AL035443, AF111168, AC004821, AC005104, AL133448, |
| | | | | | AC006388, AC005839, AL035249, AL022336, AF196969, AC004448, |
| | | | | | AC009247, AC005562, AC005058, AL079305, Z98051, AL132985, AC005261, |
| | | | | | AC005089, AC002350, AP000116, AC003102, AC005071, AL050318, |
| | | | | | AC004525, AC005332, AC006449, AF001550, AC005409, AC004967, |
| | | | | | AC006312, AC005924, AP001052, AC005519, AC005920, AC010205, Z83838, |
| | | | | | AC004685, AC005231, AC004814, AC004878, AC005081, AL049776, |
| | | | | | AC004983, AF130248, AC006946, AL034429, Z86090, AL031984, AC004851, |
| | | | | | AL109627, AC003663, AL031286, AL049636, AB023049, AL008720 |
| | | | | | AC004584, AL109798, AC005880, AC002527, AP000553, AL033527, |
| | | | | | AC004253, AL034420, AC006441, AC000353, AC002303, AC004678, |
| | | | | | AL008726, AP000692, AL133246, AC004905, AC005015, AC005037, |
| | | | | | AC002551, AC005088, AL049780, AC002094, AL031587, AL031282, |
| | | | | | AC004531, AC004655, AL035691, AL024498, AL035458, AC006965, Z95152, |
| | | | | | AL022238, AP000689, AC004811, AL049539, AC005479, AF001549, and |
| | | | | | AC002400. |
| HPFCV19 | 45 | 655706 | 1-302 | 15-316 | AI279012. |
| HPFCX18 | 46 | 655588 | 1-325 | 15-339 | |
| HPFDD06 | 47 | 960700 | 1-291 | 15-305 | AI557495, and AI557116. |
| HPFDE38 | 48 | 655704 | 1-343 | 15-357 | AI417952. |
| HPFDE61 | 49 | 974249 | 1-681 | 15-695 | |
| HPFDF79 | 50 | 973732 | 1-576 | 15-590 | |
| HPFDG58 | 51 | 655610 | 1-310 | 15-324 | |
| HPFDI23 | 52 | 655549 | 1-355 | 15-369 | |
| HPFDL90 | 53 | 954333 | 1-193 | 15-207 | U73330. |
| HPFDS59 | 54 | 655543 | 1-267 | 15-281 | AC004111. |
| HPFDT17 | 55 | 581133 | 1-359 | 15-373 | |
| HPFDT54 | 56 | 655530 | 1-310 | 15-324 | AA593648. |
| HPFDT61 | 57 | 974569 | 1-345 | 15-359 | |
| HPFDU30 | 58 | 522113 | 1-357 | 15-371 | AL079301, and AC004530. |
| HPFDU38 | 59 | 867879 | 1-365 | 15-379 | |
| HPFDU59 | 60 | 739617 | 1-357 | 15-371 | AC005225, AL049835, and AL031297. |
| HPFDV71 | 61 | 867870 | 1-680 | 15-694 | AW303098, AI061313, AI251203, AI251284, AI250552, AL046519, AI284543, |
| | | | | | T74524, AI223626, H07953, AI206841, AI254770, AI189682, AW023111, |
| | | | | | AI826761, AI357823, AI251034, AI249853, AA572813, AI375542, AI755202 |
| | | | | | AI066646, AW410409, AA129746, AI732430, AA757661, AW276678, |
| | | | | | AI679759, AW149288, AI635819, AI355007, AW439703, AI491765, |
| | | | | | AI753113, AW237905, AI149537, AA702637, AI864500, AI334443, |
| | | | | | AW192179, AL038936, AA904211, AI587583, AA614214, AI247101, |
| | | | | | AL031730, AC002316, AL031311, AL022328, AC007055, AL022326, |
| | | | | | AC006965, AL109865, AF109907, AC005081, AL034343, AC005592, |
| | | | | | AL133485, AL049538, AL022238, AC005355, AC005011, AC007358, |
| | | | | | AC005291, AL049540, AC008123, AP000688, AC004491, AL080243, |
| | | | | | AC008372, AL133445, AC003043, AC004685, AC005874, AF134471, |
| | | | | | AP000501, AF111167, Z83844, AC004675, AL049780, AF088219, AC006552, |
| | | | | | AJ011930, AC007277, AC005330, AC007243, AC006046, AC004686, |
| | | | | | AC005363, AC005209, AC005231, AC005746, Z97056, AL135960, AJ131016, |
| | | | | | AC004883, AC005619, AC005189, AC002430, AP000511, AL032821, |
| | | | | | AC006213, AF134726, AC007384, AC006130, U91326, AC002544, |
| | | | | | AC004084, AC004067, AL121603, AC005519, AC005899, AC004821, |
| | | | | | AF031078, AC008064, AJ010770 AC002369, AF030876, AC009731, |
| | | | | | AC005844, AC009510, AL031228, AC005406, AL079352, AC005884, |
| | | | | | AL022721, AL022476, AL049795, AC004879, AC005821, AL049760, |
| | | | | | AC005234, AC004593, AC007129, AC016830, AP000031, AL023284, X55927, |
| | | | | | AC006960, AC006203, AC005911, AF001548, AC010202, AC005368, |
| | | | | | U07563, AC004542, AL096701, AC006241, Z98750, AC005015, AC004656, |
| | | | | | AF015416, AF001549, Z82171, AC002350, AP000134, AP000212, AP000030, |
| | | | | | U91325, AC007385, D84401, AC002404, AC007637, AC006511, AC006480, |
| | | | | | AL031803, AC005606, AC002347, AC000115, AC005829, AF031076, |
| | | | | | AL031281, AF053356, AC004051, AL096791, AC005072, AL049758, |
| | | | | | AL133353, AC005565, AC016027, AC003101, AC005531, AC004990, |
| | | | | | AF001552, AL121652, AC004517, AL117351, AC007011, AC004033, U95742, |
| | | | | | AC003109, Z70280, Z83845, AC004147, AC007216, AC004805, AC006079, |
| | | | | | Z84470, AC005747, AC005225, AB023048, AC005099, AC005500, |
| | | | | | AC004526, AC005701, D87675, AC004841, AC005722, AF111168, |
| | | | | | AC007041, AC004963, AC004385, AC004131, Z98200, AL031659, AL121653, |
| | | | | | AL050318, AC006538, AL078581, AC007731, AC007253, AL008582, |
| | | | | | AB011399, AL022323, Z98949, AC004129, Z97054, AL117344, AP000151, |
| | | | | | AL022165, AC004893, AC007684, AC005050, AC000052, AC006946, |
| | | | | | AC006139, U78027, AL049557, AC005409, AL021026, AC006121, |
| | | | | | AC005726, AC005512, AC004230, AL133448, AC007406, AC005696, |
| | | | | | AP001052, AC005154, AF196779, AC007225, AL049712, AF165926, |
| | | | | | AC004222, Z84480, AP000010, AB016897, AC005921, AC002300, AL034374, |
| | | | | | AC004125, AC009247, AL021808, AL008723, AC006211, AC003026, |
| | | | | | Y18000, AL009181, AL031584, Z69905, AP000359, AC004976, U18394, |
| | | | | | AC004770, and AP000962. |
| HPFDZ20 | 62 | 655764 | 1-328 | 15-342 | |
| HPFEA08 | 63 | 960372 | 1-386 | 15-400 | Z82203. |
| HPFEA32 | 64 | 925499 | 1-295 | 15-309 | |
| HPIAE79 | 65 | 655748 | 1-382 | 15-396 | |
| HPIAO83 | 66 | 655595 | 1-413 | 15-427 | |
| HPIAQ49 | 67 | 919469 | 1-424 | 15-438 | |
| HPIAQ76 | 68 | 655573 | 1-47 | 15-61 | |
| HPIAV80 | 69 | 615007 | 1-211 | 15-225 | |
| HPIAZ37 | 70 | 655753 | 1-300 | 15-314 | |
| HPIBQ37 | 71 | 884289 | 1-411 | 15-425 | AA101561, W76302, C17760, AA227408, AA215609, AA101519, AA626769, |
| | | | | | AA359412, T73746, AI927392, AF111713, A91701, A91699, AF207907, |
| | | | | | AF172398, AF154005, and AB017568. |
| HPIBT49 | 72 | 655719 | 1-426 | 15-440 | |
| HPIBY65 | 73 | 655757 | 1-421 | 15-435 | |
| HPJAB19 | 74 | 655540 | 1-191 | 15-205 | AA741301, AA331014, AA461592, AI300413, AI342786, H42893, AI302277, |
| | | | | | AW407007, AI018726, AW157173, AW162314, AW162332, AW168699, |
| | | | | | R71796, AA657910, AI818313, AA429481, AA633068, AW082076, |
| | | | | | AL041733, AI471455, AI687343, AI473671, AI963816, H86579, AA225239, |
| | | | | | H30595, H30568, AA018923, AA012829, AI290145, AI459866, AA643451, |
| | | | | | AL037006, F35902, AI679759, AW392414, AA084595, AI474085, AI476386, |
| | | | | | AI925462, AI440243, AA092862, W45457, AI951112, AI620045, AI183426, |
| | | | | | AA225630, AI167360, H99222, N21300, AA992562, AW190925, AI936229, |
| | | | | | AW080772, AA829669, AI376239, AI017733, AL039117, AA381880, |
| | | | | | AW105346, AA112864, C14599, F26285, AA587536, H27788, AA904211, |
| | | | | | AA827383, AW019964, AW262466, AI799260, AI860535, AA460880, |
| | | | | | AA643441, AI962050, AI917271, AA604149, AI358557, AI032411, AI131261, |
| | | | | | AW162303, AA362440, AW162047, AW247089, AA132929, AI341664, |
| | | | | | AW161786, AA339789, AA339592, AA507990, X84712, AI902426, |
| | | | | | AA025083, AI873916, AI955029, H74309, AA578590, M85711, AI620266, |
| | | | | | AA608635, AI357628, AI345256, AI066646, AI049680, AI471476, AA019043, |
| | | | | | AI475164, H94979, AA829693, AW130427, AI755202, AI523813, AI311796, |
| | | | | | AA828154, AI267356, C14880, AA665123, AI065031, AL096791, AL034548, |
| | | | | | AL032821, AB014079, AC004991, AC007263, AL031732, AL109827, |
| | | | | | AL034549, AC004542, AP000352, AP000514, AC006139, AC008132, |
| | | | | | AC006991, AC007320, AC002088, AC004743, AC007637, AC006487, |
| | | | | | AC005971, AC004167, AF124523, AP000552, AL121754, U95740, U91323, |
| | | | | | AL050350, AL021706, AC004051, AC006160, AP000133, AP000211, |
| | | | | | AL021391, AD000813, AL049761, AC007993, AL133445, AC003693, |
| | | | | | AL049766, AB011399, AC005227, Z93784, AC006430, AC004526, AC002465, |
| | | | | | AL035072, AP000023, AC004918, AC000097, AC007664, AC006547, |
| | | | | | AB016897, AC000118, AC006084, AL024509, AP000248, AC004466, |
| | | | | | AC006322, U89335, AC010170, AL031587, AC005293, AC005208, AJ006345, |
| | | | | | AC006515, AC004805, AC003682, AC005291, AC005104, AC006251, |
| | | | | | AC004100, AF109907, AC005018, AL035588, Z97876, AP000550, AC004882, |
| | | | | | AC005949, AC005553, AC008018, AC005375, AC004478, AL031728, |
| | | | | | AC006947, AL022343, AC003002, AP000567, AL049839, AF178030, |
| | | | | | AF064858, AC006006, AL035423, AF205588, AC006236, AC007528, |
| | | | | | AL008718, AC004076, AC005225, AC004876, AC004874, AC005529, |
| | | | | | AC001231, AJ010770, AL139165, AC007312, AC005516, AP000143, |
| | | | | | AC007401, AC000083, AL049713, AC007676, AL034379, AP000090, |
| | | | | | AL031283, AC005899, AL132708, AP000210, AP000132, AF001549, |
| | | | | | AC011718, AC005046, AB020867, AL034423, AL080250, AC005011, |
| | | | | | AC010072, AC005664, AL049830, AC007773, AL121653, AC009288, Z83822, |
| | | | | | Z84487, AC005598, AL035249, K03021, AC005184, AC008000, AC006432, |
| | | | | | AC004765, AL021707, AC006441, AC004695, AL096774, D87675, |
| | | | | | AC004013, AC005183, AP000563, AL078638, AC005007, AF049895, |
| | | | | | AC003972, AC000353, AC002347, AL035461, AC004671, U73630, |
| | | | | | AC002115, AC006064, AL022318, AC004797, AC008009, AC005755, |
| | | | | | AC005589, AL049548, U07000, AF196971, AC006948, AF069291, AL031803, |
| | | | | | AC005390, AC005952, AC006254, AC004985, AC005920, AL121748, |
| | | | | | AL022396, AC005332, AC005049, AP000256, AP000566, AP000098, |
| | | | | | AC004686, Z85996, AC007436, AC006581, AL049828, Z73496, AP000052, |
| | | | | | AP000018, AP000160, AC004605, AC007731, AC007955, AC007385, |
| | | | | | AC005500, AC005192, Z83846, AC005041, AC004838, AC005480, |
| | | | | | AC003010, AC004962, AL049832, AL121838, AP000556, AC005027, |
| | | | | | AC004864, AC004539, AC005565, Z94801, AL049569, AC006538, AC006210, |
| | | | | | AC003106, AL035415, and AC000120. |
| HPJAB84 | 75 | 655531 | 1-314 | 15-328 | |
| HPJAC36 | 76 | 655601 | 1-401 | 15-415 | AI167181. |
| HPJAC92 | 77 | 867831 | 1-338 | 15-352 | |
| HPJAD09 | 78 | 655712 | 1-329 | 15-343 | AL080239. |
| HPJAD66 | 79 | 655694 | 1-276 | 15-290 | Z83851. |
| HPJAD82 | 80 | 655765 | 1-237 | 15-251 | AI979243, and AI967993. |
| HPJAV07 | 81 | 952852 | 1-321 | 15-335 | |
| HPJBI17 | 82 | 655761 | 1-417 | 15-431 | |
| HPJBI89 | 83 | 655708 | 1-69 | 15-83 | AC006071. |
| HPJBK52 | 84 | 655751 | 1-249 | 15-263 | AW275406, and AC000378. |
| HPJBU08 | 85 | 958979 | 1-351 | 15-365 | |
| HPJBV17 | 86 | 655729 | 1-286 | 15-300 | |
| HPJCC04 | 87 | 926787 | 1-357 | 15-371 | AF108195, AF159714, AF186379, AF106698, AB025784, and AF049330. |
| HPJCP10 | 88 | 964259 | 1-421 | 15-435 | |
| HPJCS84 | 89 | 590404 | 1-333 | 15-347 | AP000494. |
| HPJCX15 | 90 | 655730 | 1-320 | 15-334 | |
| HPJCX26 | 91 | 655600 | 1-337 | 15-351 | |
| HPJCY70 | 92 | 655569 | 1-218 | 15-232 | |
| HPJCZ03 | 93 | 922850 | 1-171 | 15-185 | |
| HPJCZ06 | 94 | 934170 | 1-278 | 15-292 | AI133297, AW163293, AW303196, AA191659, AW080777, AW084466, |
| | | | | | AI499588, AA279421, AA548890, AA431949, AA486131, AW301350, |
| | | | | | AA457070, H71429, AI040342, AW275510, H52274, AL133909, H82316, |
| | | | | | AI250083, AA661921, AW102846, AL042420, AI953275, AA476397, |
| | | | | | AI766906, M77893, AA630672, AI205010, AI284640, AL038498, C18550, |
| | | | | | AA320996, AA579179, AI393931, AA114983, AA774780, AL119713, |
| | | | | | AI002720, AW274349, AA508359, AI818231, AI271164, AA838190, |
| | | | | | AI806102, AA577824, AA385798, AI708009, AA578327, AI889566, |
| | | | | | AA832188, AI499301, AI801482, AI298061, T92347, AW103927, AA984295, |
| | | | | | AA558884, AA055871, AI733755, AA584876, AA504877, AA127426, |
| | | | | | AA669155, H09071, AI805363, AI203925, N23504, AA101689, AW104793, |
| | | | | | AI168167, AI694130, AA572971, AI950983, AI056913, AI345157, AI924872, |
| | | | | | AW316873, AL046689, AA653857, AA323701, AA772851, AA526787, |
| | | | | | AA778992, R64559, R95448, AA490183, H49568, AW022897, AA402129, |
| | | | | | AA493695, AA834707, AA738253, AA719073, T99179, AL035209, |
| | | | | | AL035450, AC000119, AC002529, AL133371, AC002310, AC007446, |
| | | | | | AC007845, AC002127, AJ003147, AC007652, AL031053, AC005215, |
| | | | | | AC003100, AC004638, AC006314, AL033523, AC002416, AC006466, |
| | | | | | AC006112, AC006312, AC005998, AC004745, U57009, AL049773, |
| | | | | | AL049733, AC006989, AC012599, AL035608, X53548, AC004161, X54175, |
| | | | | | D83989, AC005258, AC005072, AC006478, Z98750, AC006539, AL121653, |
| | | | | | AC004895, AL023799, AC005026, AC007214, AC002350, AC007437, |
| | | | | | AC006288, AL022163, Z82170, AC002300, AC006045, X76666, AC003965, |
| | | | | | AC004030, AC004940, Z83733, AL024506, AP000967, AL049565, AC006963, |
| | | | | | AC002527, AL049749, AL032822, AP000204, AP000126, AC005911, |
| | | | | | AL080241, AL021155, AL034395, AC005162, AL031680, AF227510, |
| | | | | | AC005048, AC004675, Z82214, AC007228, AC003977, AC004592, Z95118, |
| | | | | | AC004047, U62317, AC002430, AL121603, AC007193, AC006058, AP000244, |
| | | | | | AC006195, AF042090, AC018767, AC007384, AC007406, AF123462, |
| | | | | | AF088219, AL031054, AC007298, AC002385, U66059, AC008372, AC007564, |
| | | | | | AC006071, AC005839, AL035633, AL049649, AL022170, AL050326, |
| | | | | | AC007848, AL022166, AC004594, AP000950, AC007360, AC000066, |
| | | | | | AP000081, Z99497, AC007043, AC007243, AJ010770, AC005066, AC002559, |
| | | | | | Y09781, AL023879, AC004028, AC003683, AC004525, Z84487, AC005154, |
| | | | | | AC006374, AC007436, AC005774, AC011362, AP000962, AC005725, |
| | | | | | AF012654, X55926, AC005011, Z73417, AC004224, AC004756, Z99569, |
| | | | | | Z82193, AC004987, AC004865, AL035455, AL021918, AC007387, AL096701, |
| | | | | | AL022721, AC006369, AF001549, M22900, AC002115, AC006479, |
| | | | | | AC007955, AP000348, AL121934, AL035462, AP000563, AP000275, |
| | | | | | AC002466, AC005480, AP000037, AP000105, AP000211, AP000133, |
| | | | | | AP000201, AL049550, Z98753, AL031259, AP000097, AL033377, AC007023, |
| | | | | | AL022316, AC005940, AC004098, AL023284, AP000240, AL049781, |
| | | | | | AC006239, AC006211, AL078634, Z69838, AC004262, AC005233, AL096776, |
| | | | | | AC005301, AC007064, AC005534, AC010202, AL008718, AC007682, |
| | | | | | AL034384, AC005412, K00063, U67233, AC007510, X78081, AC006005, |
| | | | | | AC005200, AC005213, AC005226, AJ239322, AC005188, AL049557, Z84483, |
| | | | | | U95742, AC007041, AJ133269, AC006213, AL049853, AC007263, Z69922, |
| | | | | | AC005032, AL031721, AC005952, AC005490, AC004210, AL021977, |
| | | | | | AL031186, AF002994, AL021546, AF009660, U69730, AC004948, AC005363, |
| | | | | | Z98051, AC004502, Y07848, AC005606, AL008728, AF003626, AC006974, |
| | | | | | AC005250, AL096770, AP000508, AP000020, AP000161, AL008731, |
| | | | | | AL034374, AP000359, AC006004, AC004548, AC004132, AL031774, and |
| | | | | | AC005091. |
| HPJDA08 | 95 | 958182 | 1-1026 | 15-1040 | AJ003623, and AB033053. |
| HPJDJ58 | 96 | 906904 | 1-557 | 15-571 | |
| HPJDX94 | 97 | 838748 | 1-237 | 15-251 | |
| HPJEI55 | 98 | 926815 | 1-218 | 15-232 | |
| HPJEJ39 | 99 | 930988 | 1-534 | 15-548 | AL121576. |
| HPJEQ22 | 100 | 867725 | 1-629 | 15-643 | |
| HPJET90 | 101 | 836503 | 1-542 | 15-556 | T03269, D58283, D80022, D80195, D80193, D59927, D51423, D59619, |
| | | | | | D80210, D51799, D80391, D80240, D81030, D80253, D80227, D80196, |
| | | | | | D80188, D59275, D80219, D80366, D80043, D80038, D59859, D80166, |
| | | | | | D80212, AI905856, D80269, D50995, D59889, C14429, D50979, D80134, |
| | | | | | D80378, D80024, D80045, C75259, AW178893, C14014, D59502, D57483, |
| | | | | | D59787, D59610, D51097, D80164, D80241, F13647, D80268, C14331, |
| | | | | | D51060, AW177440, D58253, C15076, D59467, D80949, D80168, C14227, |
| | | | | | AA305409, AW378532, AW178775, AW179328, C14389, AW352117, |
| | | | | | AW352158, AW177501, AW177511, D51079, AW178762, D51022, |
| | | | | | AW366296, AW360811, AW176467, AW375405, AA305578, AW377671, |
| | | | | | D59695, AW179220, AW360844, AW360817, D81026, AW375406, D80248, |
| | | | | | AW378534, AW179332, AW377672, AW179023, AW178905, AA514188, |
| | | | | | D52291, D80251, D80132, AW352170, AW352171, D80522, AW377676, |
| | | | | | AW177731, AW178907, AW179019, AW179024, AA514186, D80133, |
| | | | | | AW178906, AW177505, AW179020, AW178909, AW177456, AW179329, |
| | | | | | AW178980, AW177733, AW378528, AW178908, AW178754, AW179018, |
| | | | | | AW179004, AW178914, AW178911, AW367967, AA033512, AW352174, |
| | | | | | D80302, AW178774, AW177723, D80439, D80247, T48593, AW178983, |
| | | | | | D51103, AI535850, AW367950, C14975, AW178986, D45260, A67220, |
| | | | | | A62300, A62298, D34614, D26022, X67155, A25909, A84916, D89785, |
| | | | | | A78862, AR025207, D88547, AJ132110, AB012117, Y17188, A85396, |
| | | | | | AR066482, X82626, A85477, A86792, X93549, I19525, A44171, AR018138, |
| | | | | | X68127, AF135125, U87250, AF058696, AR008278, Y12724, AB028859, |
| | | | | | AR064240, A94995, D88507, AR008443, AB033111, I18367, I50126, I50132, |
| | | | | | I50128, I50133, AR066488, A82595, AR066490, AR016514, D50010, D13509, |
| | | | | | AR060138, A45456, A26615, AR052274, Y09669, AR060385, AB002449, |
| | | | | | AR066487, A43192, Z32749, A43190, AR038669, A30438, AR008408, |
| | | | | | U87247, U79457, AB023656, AR060133, X93535, and AR008382. |
| HPJEV06 | 102 | 934096 | 1-504 | 15-518 | |
| HPQBN30 | 103 | 915897 | 1-107 | 15-121 | A49989, A20358, A20357, A99078, A28085, A28084, A75741, I43960, |
| | | | | | AR021440, A49987, A37074, A37075, A39734, A42484, A42481, E01718, |
| | | | | | E02003, A20356, A20355, E02102, E03550, E02096, E02100, E01997, A58998, |
| | | | | | E02291, E02292, E02293, E01999, E02396, E02327, E02428, E01563, E02431, |
| | | | | | E01693, E01696, AR005163, AR005154, AR005157, AR005160, AR005153, |
| | | | | | A18722, E01024, A07699, AR050583, AR050584, E02430, E01148, E12527, |
| | | | | | E01503, AR005165, E12523, E02432, A62009, E01216, E08322, I74623, |
| | | | | | I31847, I31848, AR068550, A23373, AR068551, AR060673, AR060676, |
| | | | | | A98420, A98423, A98432, A98436, A91965, A98417, A98427, A70040, |
| | | | | | I85513, AR031529, A49428, I58669, AR027099, AR051651, AR051652, |
| | | | | | AR028564, and Z96177. |
| HPZAB38 | 104 | 655591 | 1-241 | 15-255 | |
| HPWTA06 | 105 | 936026 | 1-611 | 15-625 | AA197067. |
| HPJFA10 | 106 | 963322 | 1-594 | 15-608 | AI810835, and AI817587. |
| HPJEV95 | 107 | 929723 | 1-515 | 15-529 | AA159265. |
| HPJEU01 | 108 | 928408 | 1-359 | 15-373 | R19571, AA468022, AA583898, AW364981, AI872020, AW276817, |
| | | | | | AA469451, AA828749, AL119691, AA169263, AA502860, AI110688, |
| | | | | | AA501821, AA580808, AI801600, AW303196, AI699710, AW274349, |
| | | | | | AA665021, AA362698, AA806796, AA724333, AA508034, AL042853, |
| | | | | | AA507824, AI284640, AA548058, AI247199, AA812139, AI305766, |
| | | | | | AI053790, AA581903, AI634384, AW193265, AW103758, AI963720, |
| | | | | | AI635279, AW301350, AL044858, AA521323, AA299761, AA521399, |
| | | | | | AA533725, AA513141, AW084252, AI345157, AI476312, AW440545, |
| | | | | | AI687343, AW028392, AA984708, AA584167, AI061334, AI270117, |
| | | | | | AA531079, AA491814, AA714453, AA448231, AW438643, AA525824, |
| | | | | | AA452563, AA847952, AW062682, AA828042, AA618452, AI564454, |
| | | | | | AL138265, AW002350, AW265009, AI144101, AA372481, AW419237, |
| | | | | | AW327868, AA774222, AA808877, AA623002, AA720702, AA523837, |
| | | | | | AI355206, AI350211, AA219115, H85842, AI311557, AI619997, R97780, |
| | | | | | AA576336, AI149478, AA490183, AA480772, AI017415, AI686267, |
| | | | | | AA541423, AA634889, AI908381, AA613397, AA610491, H73082, AI860013, |
| | | | | | AL045053, T74382, AA478355, AL046409, AW440497, AI110760, AA604333, |
| | | | | | AI289067, AA781010, AI754658, AA715255, AA715267, AA483771, |
| | | | | | AL043009, AI281881, AA551503, AW273218, AA826671, AI307608, |
| | | | | | AW302903, AA468456, AI536665, AA653375, AA658362, AA503154, |
| | | | | | AI801482, AW274346, AW168618, AI240168, AA702614, AA577906, |
| | | | | | AI445674, AI624142, AI783494, AI345518, AA351056, AA494097, AI885249, |
| | | | | | AA828677, AI633390, AI669453, AI744995, AI207496, AA782304, |
| | | | | | AW276827, AW410400, AI537955, AA847499, AW149339, AW265170, |
| | | | | | AW157608, AW269488, AI568678, AI054343, AW196064, AA552843, |
| | | | | | AI583283, AA788982, AW050498, AW088202, AI434695, AW276435, |
| | | | | | AA573003, AA610271, AW270382, AA954924, AW268973, AL045808, |
| | | | | | AL046156, AA664909, AA620525, AI744188, AL119713, AW238278, |
| | | | | | H18959, AI499588, AI357288, AI821271, AI357212, H63262, AI085719, |
| | | | | | AI814735, AI003751, AI246119, AW080125, AW408047, AL038705, W79504, |
| | | | | | H66632, AA220943, AI828208, AW264934, AA405453, AI254316, AL079511, |
| | | | | | AL049869, AL035462, AL078474, AC005911, AC003977, AC007564, |
| | | | | | AC005288, AC007308, AL132716, AC004884, AC005091, AC002470, |
| | | | | | AC005212, AJ239318, AC004655, AC004531, AC011421, AC003009, |
| | | | | | AC005376, AC008275, AC006312, AC005037, AF003528, AF029308, |
| | | | | | AC005274, AC004883, AC004814, AL133353, AL023284, AL022147, |
| | | | | | AC018633, AC005839, AC005082, AC007686, AL049647, AC004538, |
| | | | | | AC006270, AL008725, AC006037, AC007099, AC004690, AC005324, |
| | | | | | AC007919, AL133321, AL022165, AC008079, AC004894, AC005028, |
| | | | | | AL121578, AC007226, AJ003147, AF015153, AC006238, AL096701, |
| | | | | | AC004167, AC004622, AC010168, AC004832, AF036405, AL121603, |
| | | | | | AC002429, AP000567, AC005411, AC015853, AC002064, AC005531, |
| | | | | | AC002452, AL031651, AC007750, AL109847, AL031682, U69569, AC007151, |
| | | | | | AC007731, AC004544, AP000049, AF130342, AC005224, AC007051, |
| | | | | | AC002310, AC004905, AC004216, AL049697, AC006360, AP000311, |
| | | | | | AL049825, AC005180, AL121658, AC007450, AP000275, AL049556, |
| | | | | | AL022322, AC004587, AL049696, AF130351, AC007751, AC004010, |
| | | | | | AC005614, AC005820, AC003950, Z83846, AC008040, AC005246, AL031681, |
| | | | | | AL049757, AC005019, AC006207, AP000105, AP000037, AC004848, |
| | | | | | AF015148, AC005191, AC004584, AB020859, U67211, AP000043, AP000111, |
| | | | | | AC004975, AC004028, Z99716, AL035587, AC002430, AC007041, Z98744, |
| | | | | | Z83826, Z49235, AL031255, AL009029, AC004686, AL050333, AP000556, |
| | | | | | AL109985, AC004943, AC007537, AC000085, AC003962, X55933, |
| | | | | | AC003109, AC005154, AC002365, AC007384, AL079303, AC004913, |
| | | | | | AP000095, AL035458, AL078593, AC007165, AJ229042, AC005871, |
| | | | | | AL137100, AL031285, AF165926, AF042090, AL132992, AC006254, |
| | | | | | AC008055, AL049795, AC005015, AC002067, AC009411, AC002379, |
| | | | | | AL031733, Z98745, AL035681, AC008115, AC005225, AC005412, AC000025, |
| | | | | | U35114, AF161800, AC005193, AJ006996, AL031589, AC002041, AJ246003, |
| | | | | | AC004994, AR036572, U91328, AC003691, AL136018, AC004838, AP000239, |
| | | | | | AL031277, Z54246, AC004796, AP000953, AC003665, AC008127, AC004098, |
| | | | | | AC002565, AC003684, AF112482, AL132799, AF165138, AP000432, |
| | | | | | AC005772, AC004562, AC005235, AC005230, AC006004, AC005488, |
| | | | | | AL035423, AC005678, AC006155, AL109829, AC007207, AC002476, |
| | | | | | AL049776, AC004019, AL078603, AC007064, AC016025, AL031577, |
| | | | | | AL031230, Z69719, AC000004, AC004033, Z69917, AL096771, AC004638, |
| | | | | | AC006130, AL022302, AC006597, U47924, AC004895, U95742, AC006241, |
| | | | | | AL031904, AL022724, AL021155, AC002564, AC005011, AL078581, |
| | | | | | AC007285, AC002402, AF146191, AL109865, AC007676, AP000352, |
| | | | | | AC004057, Z98753, AP000555, AC006482, AP000965, AL021154, AL049832, |
| | | | | | AL035530, AC007632, AC006026, and AB023051. |
| HPJET11 | 109 | 965894 | 1-588 | 15-602 | N62272, and AI049662. |
| HPJES17 | 110 | 859867 | 1-426 | 15-440 | AI469935, AA035546, R54113, T27117, and H41850. |
| HPJEL02 | 111 | 918315 | 1-318 | 15-332 | AA001172, and AC006987. |
| HPJEG53 | 112 | 974074 | 1-505 | 15-519 | AC006137, and AC007160. |
| HPJDW93 | 113 | 867759 | 1-715 | 15-729 | AA213989, and AW016127. |
| HPJDT03 | 114 | 922815 | 1-388 | 15-402 | AA446260. |
| HPJDP54 | 115 | 949149 | 1-287 | 15-301 | AA621949, and AI935081. |
| HPJDF61 | 116 | 889928 | 1-757 | 15-771 | C14389, AA360910, H81346, D80195, C14014, D51423, D81026, D50979, |
| | | | | | C15076, D80164, D59467, D59502, D59275, D80193, D80227, D80038, |
| | | | | | D80166, D58283, D80022, D81030, D59859, D59619, C14331, D80210, |
| | | | | | D80391, D80240, D59787, D51799, D80253, T59438, D80043, D80269, |
| | | | | | D80212, U82828, AC005668, AF036405, AL096867, AC005300, AL050306, |
| | | | | | AC007688, AC008044, AC007052, AC004967, AC005071, AC004913, |
| | | | | | AL031666, AC007276, AC006509, AJ003147, AP000502, AL109657, |
| | | | | | AC003041, AC005529, AF023268, AL080243, D88547, AC004990, AC020663, |
| | | | | | AC003071, AC004223, AC005829, AF053356, AC005821, AC004150, |
| | | | | | AF134726, and AC010206. |
| HPJDC01 | 117 | 915056 | 1-470 | 15-484 | AI279943. |
| HPJDA25 | 118 | 951281 | 1-572 | 15-586 | AW408615, AI815752, AI906637, and AF047690. |
| HPJCU29 | 119 | 928407 | 1-615 | 15-629 | AW339568, AA525000, AW087208, AI284640, AA350859, AI471481, |
| | | | | | AA649642, AW276827, AW193265, N25296, AA469451, AA829223, |
| | | | | | AL046409, AI061334, AI049634, AI350211, AW193432, T07451, AI688846, |
| | | | | | AI289067, AI341664, AI431303, AA491814, AL041412, AI613280, AI887483, |
| | | | | | W79504, AI619997, AI375710, AI340453, AI754658, F36273, AA664535, |
| | | | | | AA134367, AI345654, AI017024, AI344844, AI963720, AI814735, AA594145, |
| | | | | | AA568778, AI830390, AA394271, AW338086, AI064864, AI281881, |
| | | | | | AI334443, AA551503, AI053672, AW303196, AW274349, AA810370, |
| | | | | | AW438643, AI446464, AA831375, AF150152, AI871722, AI298710, |
| | | | | | AA630030, AA714453, AA598824, AW301350, AI623898, AI133164, |
| | | | | | AA719805, AW410400, AA652764, AW166815, AW029038, AL041690, |
| | | | | | AA126051, AA126035, AA610491, AI434695, AI537955, AA526342, |
| | | | | | AI754955, AW406162, AI379719, AI888008, AI085719, AA486414, AI270117, |
| | | | | | AI962050, AA652057, AI801600, AA771811, AI708009, AI732186, |
| | | | | | AW303876, AW162049, AI929531, AA598586, AI610159, AA713815, |
| | | | | | AW265009, AA470969, AA581903, AI821271, AW276817, AI679782, |
| | | | | | AI133102, AW088846, AW439558, AA191620, AW269488, F29989, |
| | | | | | AI339850, AI291268, AI291124, AW406755, AW419262, AA521323, |
| | | | | | AI282832, AL044940, AA513181, AI567674, AW302013, AL138455, |
| | | | | | AI341548, AI110770, AI471543, AI133636, AA522942, AA582911, |
| | | | | | AA644538, AI251002, AI499134, AI963095, AA862173, AA730684, |
| | | | | | AW339687, AI358343, AL038785, AW265385, AA491831, AI151261, |
| | | | | | AI499938, AF150222, AA634146, AA682912, AI358229, AI281697, AI367497, |
| | | | | | AW008317, AI160117, AA587604, AW104748, AA542991, AI357551, |
| | | | | | AL138265, AA678436, AI287651, AA323749, AA649705, AI561060, |
| | | | | | AL120674, AI745325, AL048925, C05986, AI148277, AI859742, AI625244, |
| | | | | | AI761471, AW270270, AI457397, F19012, AA084070, AL119691, AI281903, |
| | | | | | AW440836, AW406447, AI143242, AA623002, AA602528, AA837084, |
| | | | | | AW272758, AW157005, AI937850, AA111909, AA531372, AI801591, |
| | | | | | AI365988, C75026, AA569387, AI669453, AW162489, AW088058, T06828, |
| | | | | | AA644551, AA487858, AA665742, AW008952, AA569205, AA071144, |
| | | | | | AA148489, AA348311, AI469003, AI590689, AI590958, AI262909, |
| | | | | | AA302963, AA599920, AI279165, AA703820, AI371070, AI951889, |
| | | | | | AI245679, AI653886, AI866908, AW148792, AI471487, AI561255, F23205, |
| | | | | | AI801482, AI873916, AA577906, AL120687, AA837351, AA729721, |
| | | | | | AI744995, AA521399, AA992126, AW071196, AA977743, AI683577, |
| | | | | | AW276435, AI539563, AI828208, AL079645, AI570261, AI917271, |
| | | | | | AW243960, AI635818, AA721981, AI469624, F01314, AI028510, N25042, |
| | | | | | AA492166, AI624142, AI749559, AI569086, AA488395, AW103758, |
| | | | | | AL049610, AL031283, AC004522, AC004901, AC005033, AL050342, |
| | | | | | AC006544, AL022161, AC004953, AF001549, AC002558, AL035541, |
| | | | | | AC004070, AP000244, AC007221, AC018769, Z84484, AL035494, AC004703, |
| | | | | | AC006543, AL022323, AC005821, AC003098, AC005829, AC005839, Z98941, |
| | | | | | AL031735, AL049554, U92032, AC002412, AC005482, Z84478, AC002300, |
| | | | | | AC009069, AC007240, AL109611, AC006559, AL034424, AL022320, |
| | | | | | AL080241, U69730, AC003690, AC004817, AC005682, AL035420, |
| | | | | | AC000086, AL008638, AL024498, AC007242, AL049611, Z82202, AL049692, |
| | | | | | AC004551, AC000003, AC004605, AC005901, AC002289, AC003003, |
| | | | | | AC005988, Z75889, AC000124, AL031681, AC007966, AC003669, AC002407, |
| | | | | | AC005086, AC002288, AF047825, AP000077, U95739, AC003035, AC005751, |
| | | | | | AC008008, AC005736, AC006059, AC003049, AC004870, AC011456, |
| | | | | | AL110503, AL022068, AL132642, AP000946, AC005566, AL021307, |
| | | | | | AC009802, AL049632, AC006958, AC005244, AL023283, AL008639, |
| | | | | | AC010175, AC002287, AF179633, AC005632, AC006079, U51559, |
| | | | | | AC006960, AC004832, AC018633, AC006537, AP000010, AC002492, |
| | | | | | AF049895, AC004931, AL109939, AC006112, AF191069, AF096876, |
| | | | | | AC006479, AP001046, AC004690, AL079333, AC003964, AL133162, |
| | | | | | AP000127, AP000205, U62317, AL008720, U91321, AP000073, Z84489, |
| | | | | | AC002429, AL022326, Z94865, Z95331, Z97184, AC007541, AC004019, |
| | | | | | AC004967, AC006153, AC005531, U66059, AL110122, AL049833, AP000459, |
| | | | | | AF165147, AC005741, AC004948, Z82188, AL021877, Z95152, AC000353 |
| | | | | | AL035681, Z95115, AC007114, AC005815, AC005778, AL096712, AL034549, |
| | | | | | AL035419, AC007298, AC005089, AR036572, U91328, AC002395, |
| | | | | | AL080243, Z84814, AP000512, AF068862, AC005696, Z86061, AC002477, |
| | | | | | AC006505, AL035250, AL049744, AC002115, AC007068, AC002457, |
| | | | | | U47924, AC005245, AP000253, AL034451, AL023581, AC005019, AC004659, |
| | | | | | AF029308, Z97989, AL049569, AC004990, AC008101, AL033376, AL031650, |
| | | | | | AL049745, Z85987, AC005046, AL121593, AP000952, AC005274, AP000213, |
| | | | | | AJ003147, AP000135, AC004638, AP000031, AC006057, AL035588, |
| | | | | | AC004848, X54180, AC002375, AC004884, AF015154, AL121748, AC007319, |
| | | | | | AL049539, AL049829, AC005323, AC004453, AL109981, AF111168, |
| | | | | | AC002094, AP000495, AL022311, AL021808, AL031778, AC004047, |
| | | | | | AC005859, AL121603, AC000397, AL121591, AL023281, AL031319, |
| | | | | | AC007243, AL022163, AC005041, AC002400, AC004455, AF134726, Z69838, |
| | | | | | AC005412, AL034553, AC007682, AC006441, U62631, U91326, AC004837, |
| | | | | | AL133245, AC008064, AC007091, Z68872, AC007934, AC005940, and |
| | | | | | AC006430. |
| HPJCT81 | 120 | 494874 | 1-401 | 15-415 | T47764, AI240418, AI042373, AI680840, and T23659. |
| HPJCT26 | 121 | 559949 | 1-628 | 15-642 | |
| HPJCS73 | 122 | 975087 | 1-540 | 15-554 | AC009533, and AC008013. |
| HPJCS43 | 123 | 715082 | 1-426 | 15-440 | |
| HPJCS32 | 124 | 699046 | 1-261 | 15-275 | |
| HPJCN60 | 125 | 887600 | 1-408 | 15-422 | AC005754, and AF152495. |
| HPJCL55 | 126 | 670083 | 1-580 | 15-594 | AA460600, AA971933, AA461528, AI028767, AW104221, AA916255, |
| | | | | | AI807812, AA815321, AA609716, AA897273, and AA382975. |
| HPJBU40 | 127 | 710928 | 1-411 | 15-425 | T79399, T79485, and AC004460. |
| HPJBU09 | 128 | 625362 | 1-520 | 15-534 | H14685, H11846, and Z42042. |
| HPJBS74 | 129 | 765390 | 1 -579 | 15-593 | AA199800. |
| HPJBS52 | 130 | 726535 | 1-505 | 15-519 | R69458. |
| HPJBS35 | 131 | 867818 | 1-427 | 15-441 | R08072. |
| HPJBL76 | 132 | 769889 | 1-764 | 15-778 | N20501, W21595, AA971971, AI017087, AA782105, AI924135, and |
| | | | | | AC007066. |
| HPJBL30 | 133 | 948721 | 1-1114 | 15-1128 | AI743553, AI458005, AA855142, AI808388, AI808190, AA854848, AI167631, |
| | | | | | AI458852, AI740975, AI184926, AI027358, AI084343, AI041477, AA860979, |
| | | | | | AA782086, AI864309, AA585255, and AL035562. |
| HPJBK25 | 134 | 974606 | 1-199 | 15-213 | |
| HPJBK14 | 135 | 974593 | 1-317 | 15-331 | Z98272, and AC005202. |
| HPJBH45 | 136 | 717088 | 1-391 | 15-405 | H02676, R21208, and AC006480. |
| HPJAX30 | 137 | 607408 | 1-748 | 15-762 | |
| HPJAU73 | 138 | 806718 | 1-306 | 15-320 | W04456, H09371, D59238, H09370, N34243, AA091691, and N75681. |
| HPJAP92 | 139 | 887830 | 1-416 | 15-430 | Z97832. |
| HPJAO13 | 140 | 824243 | 1-895 | 15-909 | AI284640, AI801600, AA745582, AA491814, AI350211, AA745431, |
| | | | | | AI902694, AW080134, AI053672, AL133723, AW193265, AI688846, |
| | | | | | AI446464, AA492132, AA985038, AA747480, AA350859, AA318652, |
| | | | | | AI286356, AI471543, AI679045, AA649942, AI610159, AA503258, H64777, |
| | | | | | AA515435, AI761471, AI469624, T07451, AI281697, AI251002, AI205126, |
| | | | | | F25276, AA977743, AA515751, AA559290, AI281881, AW419262, AI610376, |
| | | | | | AW276435, AA678436, AA747276, AW088058, AW274349, AI648558, |
| | | | | | F29989, AI061334, AA605274, AA747472, F36273, AI962050, AI287651, |
| | | | | | AA553465, AI264743, AI344844, AI198376, AA377730, AA483034, |
| | | | | | AA650244, AA469451, AI312149, AI049634, AA745560, AI918421, |
| | | | | | AI471481, AW103981, AI937850, AA490165, AI768952, AA659083, |
| | | | | | AI367975, AA594145, F18974, AI245679, AA364224, AA365302, AA680243, |
| | | | | | AI286264, AI624698, AW440976, AA441788, T40338, AW236342, |
| | | | | | AA521323, AA557879, AA843450, AW265170, AI287964, AW029038, |
| | | | | | AL046409, F31204, F28776, F37169, H64560, AI305547, AW193432, |
| | | | | | AI339850, AI963720, T53607, AI929531, AL120483, AA347927, AA708678, |
| | | | | | AI282832, AI358571, R91994, AI904894, AW243960, AI358343, AW243698, |
| | | | | | AI184226, AW166815, AA657918, AA515051, F23279, AL045182, AI355206, |
| | | | | | AW264973, AI919029, AI431303, F33566, AW276827, AA347930, F37286, |
| | | | | | AW303196, AA886584, AA244415, AI206785, N43757, AA302963, |
| | | | | | AA482711, AA338486, AI270117, AA501722, AA229785, AI821271, |
| | | | | | AA503154, AA669840, F35673, AA557686, AI653905, N71930, AW272758, |
| | | | | | AW301350, AA358122, AA6547771, F34558, AW104748, AW406755, |
| | | | | | AA664535, AA100372, AA084070, AA810318, AW265654, AA364456, |
| | | | | | AI924251, AW261871, AA682912, AW088202, H41319, T08638, AI619997, |
| | | | | | AW162049, AI832782, AI633007, Z98473, AA581903, AI358501, AA669251, |
| | | | | | AA394271, AI365988, AI569086, F28576, AI083946, AI963095, AA610491, |
| | | | | | AI866956, AI299050, F28204, T06783, AW238278, AI692265, AI802526, |
| | | | | | AI358229, AA515224, T40617, T29180, AI083998, AL119691, AA528516, |
| | | | | | AI309740, T40077, F26152, C75026, AI709365, AI133636, AI081095, |
| | | | | | AF150152, AA715609, AI567674, AC004076, AF019664, D83989, X75335, |
| | | | | | ACC007446, AC005598, U57007, I51997, AL031680, AL008725, M87916, |
| | | | | | AP000297, X55925, U57009, U14718, U80017, AC009498, Z30979, M37551, |
| | | | | | AF015152, U18394, AP001035, X55928, X54180, U18391, U18392, U57006, |
| | | | | | U18393, U57005, U18390, AL049776, S75337, M87919, AC005546, U18399, |
| | | | | | S70697, X55924, U18398, AL035448, Z81370, AC006942, AL031118, X55932, |
| | | | | | AL023553, AC005291, AL109801, AC006205, U18395, AC006537, |
| | | | | | AC005032, AC005790, AC005335, X54181, X54178, X55931, U57008, |
| | | | | | AC006251, X54175, S70707, S70694, U02058, U02054, U02063, Z93016, |
| | | | | | AC005028, U14716, AF147277, AP000044, AB020859, AP000112, AB024685, |
| | | | | | U14719, U14713, AL031577, AC007386, AL035458, AC005284, AF077058, |
| | | | | | AC003954, U14710, AC002038, X55922, U14714, AC005019, X55926, |
| | | | | | AL031650,Z75888, U18387, X55930, AC005912, U14711, U14712, |
| | | | | | AC011198, AC005614, U95740, U14706, AP000306, AC005193, AC007298, |
| | | | | | Z94721, U14695, U14705, Z75887, U14702, U14689, U14691, U14685, |
| | | | | | U14686, U18396, AP000047, AC007370, AB023057, AC002564, U02048, |
| | | | | | AC009069, AP000520, AC005565, D26067, Z84474, M87918, U72787, |
| | | | | | AC007216, AC005251, AP000115, AC005815, AC000387, U14715, |
| | | | | | AC004020, AC004263, AC005069, D87000, U14703, S70699, AL031427, |
| | | | | | U95742, AL022154, U47924, AC008115, AB020668, S77605, AF055066, |
| | | | | | AF015156, AC006208, X54179, U14699, U14687, U14688, U14692, |
| | | | | | AP000553, AL139054, AC009516, AC004964, AC006211, AC004193, |
| | | | | | AC004659, AC008071, AL132992, AC002404, AC004957, U62292, |
| | | | | | AC001164, AP000567, D89870, A39972, AC002544, Z85987, AL133404, |
| | | | | | Z92845, AC005250, AC008079, AF139813, Z82195, U14717, AL034553, |
| | | | | | AL110120, AL031714, AC006285, AC004990, AC005592, AL031054, |
| | | | | | AL035209, AC006336, AL023513, U67221, X54177, AL035450, AC007099, |
| | | | | | AL035551, AL050318, AC004453, AC006204, AC004854, Z98744, AC004638, |
| | | | | | AC007012, AP001172, U18400, AF015160, Z84814, AC004637, AL031602, |
| | | | | | AC005838, AC004813, AC004019, AF015153, Z98043, AC004878, AC006152, |
| | | | | | AC005360, AC004765, U63721, AC003982, AC004187, AC006511, |
| | | | | | AC005071, AL034549, AC006207, AC005104, U14700, AC010436, |
| | | | | | AC005993, AC004152, AL021546, U14690, AL049633, AC004890, Z31005, |
| | | | | | Z82008, AF015155, AP000252, AL133399, AC005670, AC007312, AC007243, |
| | | | | | AC008101, AC007043, U73684, AL021977, AC004477, AL121603, |
| | | | | | AC007617, Z75746, U34879, U91326, AL034548, and AL049781. |
| HPJAN69 | 141 | 754858 | 1-346 | 15-360 | |
| HPJAN67 | 142 | 751384 | 1-308 | 15-322 | AA961913, AI088143, AW263056, AI923972, AW205741, W19869, |
| | | | | | AC004962, and AL049431. |
| HPJAN57 | 143 | 734503 | 1-239 | 15-253 | AL133246. |
| HPJAJ20 | 144 | 669000 | 1-754 | 15-768 | R11971. |
| HPJAE51 | 145 | 725761 | 1-564 | 15-578 | H16572, AW241811, H18666, AW241812, AW129128, AW009414, |
| | | | | | AA553981, AA876116, AI243349, AA757971, AL035696, AC004842, |
| | | | | | AF020802, AP000687, AJ229041, AL035252, AC005908, AL009179, and |
| | | | | | AL022324. |
| HPJAA27 | 146 | 419786 | 1-348 | 15-362 | E17067, and E178068. |
| HPICG93 | 147 | 887817 | 1-434 | 15-448 | |
| HPICE06 | 148 | 935095 | 1-804 | 15-818 | H97402, R51737, N69864, and N24204. |
| HPIBY36 | 149 | 708183 | 1-504 | 15-518 | H08396, R25790, N53251, N51204, Z42071, and AP001115. |
| HPIBT62 | 150 | 743135 | 1-475 | 15-489 | R23515, N76536, T74959, F12749, AI961429, F11571, and AA640294. |
| HPIBO89 | 151 | 786741 | 1-459 | 15-473 | H96715, W90479, R49610, AA983768, AA904877, AA677746, R38813, and |
| | | | | | AL133095. |
| HPIBI89 | 152 | 867845 | 1-426 | 15-440 | R99003. |
| HPIBH31 | 153 | 838809 | 1-428 | 15-442 | H73369, N34255, AW160399, H79944, AW239079, AA132425, R20300, |
| | | | | | H73299, N30499, AW407963, H70394, R97376, W52852, AA182911, |
| | | | | | AW407596, AA302225, N43927, W19497, T70776, W31972, N42142, T85051, |
| | | | | | N23533, AA093843, AA305409, AA312807, AA045678, W80575, AA326688, |
| | | | | | AI245848, AA035464, AA329750, AA229940, AW175673, W07289, |
| | | | | | AA332809, AI631124, AA372693, R07414, AW407906, R57473, AA299454, |
| | | | | | AA455701, N55991, AA230126, H03161, AA223846, AW205900, H96200, |
| | | | | | AA364785, AA467792, AA035465, AA307572, AA024761, C00198, W76420, |
| | | | | | AA176320, AA120782, AI719711, AI719084, AI453530, AW162019, |
| | | | | | AW173349, AI984009, AI0088520, AA639784, AA1278810, and AL024498. |
| HPIBC93 | 154 | 785971 | 1-426 | 15-440 | AI814342, AW001123, AI924201, AI935359, AA888820, AI366738, |
| | | | | | AA665651, AW134874, AA252373, AA766826, AI198343, AA670436, |
| | | | | | H42655, H62371, AI763375, Z97630, AF077740, Z79834, Z79925, Z58542, |
| | | | | | and Z58541. |
| HPIBB45 | 155 | 867850 | 1-165 | 15-179 | |
| HPIBB43 | 156 | 715037 | 1-234 | 15-248 | |
| HPIBB32 | 157 | 698901 | 1-172 | 15-186 | AL021366, and AL050332. |
| HPIBB19 | 158 | 668489 | 1-405 | 15-419 | |
| HPIAW91 | 159 | 790033 | 1-713 | 15-727 | AI690139, AI697496, N91409, N69381, AI695286, AC004200, AP000519, |
| | | | | | AB023056, and AF055066. |
| HPIAV06 | 160 | 935111 | 1-373 | 15-387 | AA600329, AI061271, AI609972, AA573000, AA551268, AI580707, |
| | | | | | AA665532, AI306717, AL138199, AA502207, AA302661, AA295865, |
| | | | | | AA295874, AA838091, AA378489, AA779783, T40629, AA601343, |
| | | | | | AA577824, AA665187, AI520967, AI452836, AA526424, AA553579, H25938, |
| | | | | | AA599080, AI417586, H47201, AA318116, AW084173, AL037777, |
| | | | | | AA349606, AA320521, C16718, N94325, AW236288, AI494417, R70884, |
| | | | | | AA099840, AL137946, AI921706, AA172191, AA349937, AL041375, |
| | | | | | AA719523, AI819391, AA262752, AA009855, AA551400, AA468196, |
| | | | | | AI932900, AA552966, AI570943, N91711, AA468247, AA810154, AA552202, |
| | | | | | AA137274, AL042373, AI889579, AA659656, T94140, N75708, Z97353, |
| | | | | | AC007707, Z98941, AL034429, AL109984, AL132642, AL035685, AC007934, |
| | | | | | AP001038, AB023048, AL035106, AC022517, AC004259, AC004967, |
| | | | | | AL132987, AL021395, AL035457, AB023050, AC003035, AC005095, |
| | | | | | AC012085, AC005940, AC004912, AL022577, AL031733, AL034555, |
| | | | | | AC003667, AC006432, AC004149, AL031594, AP000501, AP000036, |
| | | | | | AC005513, AC005243, AC004881, AC007381, AL031845, AP000511, |
| | | | | | AL049745, AC007242, AL035090, AC004033, AC002040, AC005823, |
| | | | | | AC007731, AP000263, AC005366, AC005500, AF037338, AC007639, |
| | | | | | AC003684, AF179633, U73634, AC007314, AC007298, AC004585, AP000100, |
| | | | | | AF126403, AC004674, AC002390, AC006313, AL031230, AC013417, |
| | | | | | AL049694, AC006312, AC006388, AC005325, AL031297, AC006080, |
| | | | | | AC005220, AC004922, AC005291, AC004814, Z83844, AC005598, |
| | | | | | AC004525, L78833, AC004228, AC004947, AC007172, AC004000, AL121578, |
| | | | | | AL139054, AL031668, AC005529, AC005071, AL034420, AL133238, |
| | | | | | AL008583, Z84487, AC002375, AC007690, AC005006, AC000003, AC005527, |
| | | | | | AF107885, U73638, AL031735, AL035086, AC004953, AC004687, AF067844, |
| | | | | | AL050325, AC005037, AC004217, AC005859, AC012384, AC005881, |
| | | | | | AL035251, AC002395, Z83840, AC005913, AC006443, AC007450, Z97054, |
| | | | | | AC008372, AC005695, AC005821, AC004876, AC006132, AP001040, |
| | | | | | AC006536, AC005304, AF053356, AL035460, AC004216, AC007349, |
| | | | | | AF045555, AD000813, AL109657, AL035659, AC007637, AF001552, |
| | | | | | AC004491, AC005067, AC000159, AF139813, AL008582, AL049869, Z84484, |
| | | | | | AC005480, AC004858, AC009516, AC007559, AC002312, AC005158, |
| | | | | | U91318, AP000279, Z93017, AL031311, AL031186, AP000152, AC007182, |
| | | | | | AC011311, AC007308, AC002492, AC005305, AF111168, AL031255, Z85986, |
| | | | | | AL031685, AC005081, AC003681, L78810, AC009405, AL035587, AC002091, |
| | | | | | AC007225, AC005245, AF017257, AB020868, AC005800, AC020663, |
| | | | | | AC006480, AC005409, AL117258, AC002369, AL008637, AL031427, U93037, |
| | | | | | Z73359, AC005015, AC002054, AF196969, AL096702, AL050318, AC006948, |
| | | | | | AP000106, AP000038, AC003030, U47924, AC002094, AC007227, AL035398, |
| | | | | | AP000512, AL035420, AC004770, AC007868, AC002470, AC005544, |
| | | | | | AC006441, AC007388, AC004812, I34294, AL035461, AL009179, AC005277, |
| | | | | | AJ229041, AC006037, AL021878, AC002504, U91321, AL031677, AC002531, |
| | | | | | AL049757, Z97832, AC005519, AC005993, AC007860, AC004883, AC002350, |
| | | | | | AF024533, AC005288, AL049748, AC002400, AC006254, AC007842, |
| | | | | | AL033518, AL031291, AC004673, AP000103, M87912, AC006026, |
| | | | | | AL035079, AL049712, Z95114, AC004143, AC006430, AP000154, AC005088, |
| | | | | | AC005923, AC000085, AC006333, and AF200465. |
| HPIAQ70 | 161 | 973604 | 1-507 | 15-521 | |
| HPIAP79 | 162 | 774817 | 1-499 | 15-513 | AL043020, T66111, T74122, R53143, R20480, R05568, F12380, H05013, and |
| | | | | | Z92544. |
| HPIAD10 | 163 | 906987 | 1-1270 | 15-1284 | AA601278, AI791227, AL121287, AW069227, AI307201, AW168433, |
| | | | | | AA578621, AA587516, AW404225, AA832145, AI285578, AI309943, |
| | | | | | AI634187, AI590404, T08386, AI890794, AC005233, AL031983, AC003999, |
| | | | | | AL021026, AC006137, AC007182, AC007298, AC007685, AL079342, Z82188, |
| | | | | | AL118497, Z92547, Z68756, AP000322, AL021978, AP000121, AL021154, |
| | | | | | AC003010, AF109907, AC004887, AC003964, AL031767, AC006210, |
| | | | | | AC007388, AP000053, AP000168, AL021393, AP000362, AP000281, |
| | | | | | AC004785, AC007425, Z97205, U91328, AC004216, AR036572, AB020863, |
| | | | | | AB020868, AC005697, AC008064, AF001552, AC004858, AC004125, |
| | | | | | AL050307, AC004897, AC005057, Z93244, AC004106, AC000029, AC005228, |
| | | | | | AP000040, AP000108, AC002390, Z84467, AF152365, AL035414, AC005295, |
| | | | | | AC004455, AC007327, AC005839, AC005011, AL035608, AC007240, |
| | | | | | AC004974, AL049712, AC006116, Z86090, AL096776, AC004388, AC005482, |
| | | | | | AC005181, U95740, AP000338, AC007284, AC005252, Z68192, AC005184, |
| | | | | | AC007406, U62293, AP000216, AL034402, AF117829, AL024507, AC008040, |
| | | | | | AL022163, AL031293, AP000432, AC005291, AC005730, AC005971, |
| | | | | | AC005331, AC007263, AC004003, AL132992, AB023050, AC004844, |
| | | | | | AC004832, AL079304, AL035089, AC003006, U91318, AC005588, AL021918, |
| | | | | | AC003101, AL132774, AC005618, AC004817, AL022578, AC006032, |
| | | | | | AC005953, AC002375, AP001053, AC006167, Z95704, AF196970, AL109967, |
| | | | | | AP000511, AC006257, AC009399, AL078602, AC005027, AL031280, |
| | | | | | AL021807, AC004859, AC005838, AC009498, AC004702, AL133404, |
| | | | | | AC002394, AL139054, AL031653, Z97055, AF015416, AC006480, AC007114, |
| | | | | | AP000144, AL035420, AC009946, AL136168, AL049869, AC005102, |
| | | | | | AC006536, AC006509, AL031665, AC006277, AL109847, AC005881, |
| | | | | | AC003046, AF111169, AL133241, AC004087, AC005411, AC005036, |
| | | | | | AC004797, Z84480, AC005874, AF134471, AP000353, Z95115, AP000043, |
| | | | | | AP000111, AF002993, AC002123, AL050306, AC005534, AC006059, |
| | | | | | AC004525, AC005993, AC007546, AC004104, AC004605, AC005029, |
| | | | | | AL133304, AC005609, AC010206, AC002531, AC007656, AC002464, Z95116, |
| | | | | | AC005401, AC005013, AC003037, AC007462, AP000140, AL009051, |
| | | | | | AP000509, AC004185, AP001058, AL022237, AP000088, AC006484, |
| | | | | | AC004910, L47334, U91325, AC004975, AC005028, AL117258, AF172277, |
| | | | | | AC006075, AC004067, AC007225, D84394, AC006387, AC005049, |
| | | | | | AC004921, AL110503, AL121877, AC005799, AC005050, AC004825, |
| | | | | | AC005535, AC004838, U52112, AC004964, AP000431, AL022396, AC007541, |
| | | | | | AC007028, AL133355, AL049872, and AC004690. |
| HPFDX38 | 164 | 709302 | 1-571 | 15-585 | AA649151, AA251443, AW080521, AI261734, and AA761257. |
| HPFCZ82 | 165 | 780198 | 1-509 | 15-523 | W73400, W73375, AA550828, AF086321, and AC008042. |
| HPFCZ60 | 166 | 430125 | 1-477 | 15-491 | N27955. |
| HPFCZ10 | 167 | 968360 | 1-308 | 15-322 | |
| HPFCR23 | 168 | 675120 | 1-432 | 15-446 | H01127, and AI696650. |
| HPFCP82 | 169 | 867881 | 1-675 | 15-689 | AW023111, AW021917, AI635440, AI800180, AW328331, AA714110, |
| | | | | | AI800168, AI962030, AL046519, AW237905, AI887235, AA297145, |
| | | | | | AA129746, AI792521, AA831638, AI440117, AI687343, AW270255, |
| | | | | | AI491765, AI799607, AL119691, AI821931, AW419389, AW275432, |
| | | | | | AI755057, AW008169, AI254959, AI792499, AA528503, AA773463, |
| | | | | | AW238253, AI380617, AL119247, AA456924, AI345132, AA502532, |
| | | | | | AI267269, AL037714, AW189113, AA837686, AI278972, T05118, AI753672, |
| | | | | | AI279417, AI889795, AI889804, AI732789, AA284247, AW157456, AI874341, |
| | | | | | AA433894, AW162697, AI369580, AI445934, AI912401, AL135357, |
| | | | | | AI284543, AI250552, T74524, AW168420, AW410354, AA828637, AI144055, |
| | | | | | AA397389, H38769, AA314891, AW238484, AA864603, AW407632, |
| | | | | | AA618316, AI053793, T49633, AI362442, AI560085, AI251034, AI206841, |
| | | | | | AC005913, AC007327, AL035090, AL022320, AC005082, AC004805, |
| | | | | | AL078477, AL031846, AC004659, AC007193, AC007216, AC007011, |
| | | | | | AC007363, U95742, AL023580, AC000052, AC004025, AC005022, |
| | | | | | AL133353, AC004877, AC007277, AC031053, AC007684, AC035073, |
| | | | | | AL049830, AL031186, AL031297, AC003991, AC007919, AP000080, |
| | | | | | AC007425, AC005730, AC004019, AC004531, AC004673, AF134471, |
| | | | | | AC006064, AC004796, AR038762, AL049570, AL050332, AC007151, |
| | | | | | AC007738, AL049557, AC007546, AC006153, AC004053, AF031078, |
| | | | | | AC006581, AF030876, AC005736, AF181896, AL035413, AC007051, |
| | | | | | AL031311, AC004743, AC008055, AF017104, AL022336, AC005969, Z80896, |
| | | | | | AC007857, AC004832, U85195, Z93023, U91321, AC005089, AB023048, |
| | | | | | AC002326, AE000658, AL034549, AC002395, AC004975, AC007899, |
| | | | | | AC005324, AC009946, AC002480, AL035414, AC002070, Z93241, AC005399, |
| | | | | | AC005246, AL035610, AL109758, AC007450, AC004804, AP000076, |
| | | | | | AP000962, AC003012, AC006455, AC008012, AC005771, AC002316, |
| | | | | | AC005553, AL035405, AC004106, AL109657, AL031779, AE000660, |
| | | | | | AC007100, AL049779, AC008009, AC007436, AL031346, AC004821, |
| | | | | | AC007676, AC005696, AC007242, AC005053, AC006285, AC005071, |
| | | | | | AC004895, AL033521, AL050307, AC002465, AL035659, Z97353, AP000035, |
| | | | | | AC004540, AC003108, AL021326, AC006385, AC005529, AF196779, Z85996, |
| | | | | | AC005046, AL049869, U95743, AL133321, AF165926, AC004383, AC004466, |
| | | | | | AL133445, AL023807, AC005207, AC005821, AL021366, AC006316, |
| | | | | | AL022323, AC010205, AP000356, AF020503, Z98304, AC005520, AB026898, |
| | | | | | AC002556, AC005609, AP000510, AC005703, AC009178, AC007687, |
| | | | | | AC006026, AL117351, AL021579, AC002553, AC006065, AC007564, |
| | | | | | AC005874, AD001527, AC005962, AC005755, D87675, AC008040, |
| | | | | | AL049646, U91327, AC007066, AP000038, AL031133, AF067844, AL132777, |
| | | | | | AC005920, AL133448, AL008732, AC005152, AP000141, AC005323, |
| | | | | | AP000501, AC004196, AL133246, AC002492, AC006552, AC006406, |
| | | | | | AC004167, AC007227, AL050348, AC005901, AC005562, AL008583, |
| | | | | | AC005094, AF001549, AC006965, AC004408, AC007199, U96629, |
| | | | | | AC007371, AL109801, AC005015, AC004126, AC005534, AC005409, |
| | | | | | AL031257, AC002429, AC009464, AC004232, AL021154, Z94056, AC004072, |
| | | | | | AL021918, AC005900, AB014078, AL034369, AP000088, AL050309, Z82206, |
| | | | | | AC007041, AF111167, AL031597, AC009516, AC002425, AC004253, |
| | | | | | AC009509, Z75887, AC007052, AL049760, AP000152, AP000010, AJ239322, |
| | | | | | AF027390, AL121603, AC000353, AB020868, AC006241, AL008710, |
| | | | | | AC002996, AL049776, AC008072, Z82244, AC003101, Z82217, AC004099, |
| | | | | | AC002470, AL031313, AL031664, AF134726, AL133163, and AC006597. |
| HPFCP53 | 170 | 526574 | 1-487 | 15-501 | H66573, AA381762, AI689019, H54210, AA563770, AA664604, AI244254, |
| | | | | | AW021116, AI500552, AA130647, AA879053, AI275183, AA669706, H64777, |
| | | | | | AA367788, AA468486, AA604843, AI588856, N45421, AA573213, H93293, |
| | | | | | AA310557, AI004591, F02412, AI623563, AI270476, AW168483, T08421, |
| | | | | | AI309384, AA448838, AI803809, N67387, H55894, AA837715, AI471691, |
| | | | | | AA298386, AA599495, AI473701, AI279759, AA904275, AI627581, F02421, |
| | | | | | AI440324, AI598060, AI754291, R92640, AI471572, T03203, AA574286, |
| | | | | | AI357551, AI885572, AW189353, AA650447, AW168479, AI271762, |
| | | | | | AI305258, AI360514, AI609223, AL046746, AA669709, AI687962, N38789, |
| | | | | | AI076236, AA847099, AI821044, AA669102, AA487542, AA679872, |
| | | | | | AA491484, AA077776, F17700, AA086318, AI561116, AA378683, AA558344, |
| | | | | | M78007, AA365586, AW079809, AA613627, AI889579, W95503, T94116, |
| | | | | | H96518, AW270256, AW404844, H44786, AI915081, AA664283, AL045709, |
| | | | | | AA640979, AC012627, AC005969, AC002452, AC003664, AC005841, |
| | | | | | AJ250915, AC007999, M17262, AL049775, AC009509, AC004854, AC005620, |
| | | | | | AC005988, AC003086, AC002314, AD000671, AC004805, AL022313, |
| | | | | | Z84487, AC005207, AC004783, AL031665, AC003690, AL020997, AL096817, |
| | | | | | AC004263, AL022318, L48038, AL022578, AC002059, U63721, AL049793, |
| | | | | | AC004659, AL137434, AC004254, AL020996, AL021937, AC000003, |
| | | | | | AC005832, AL022156, AC006273, AC000026, AC002115, I34294, AC007435, |
| | | | | | AC005913, AC005291, AL049589, AL096791, AC003110, AC004637, |
| | | | | | AL021155, AC007363, AL109837, AC020663, AC006043, AC006126, |
| | | | | | AC006930, AB015355, AC000052, AC005072, AC018633, AL033392, |
| | | | | | AL031447, AC005277, AC007371, AC005274, U47924, AC006512, |
| | | | | | AC007386, U73167, U90094, AC005498, AC007228, AF092925, AC002544, |
| | | | | | AC004967, AF187725, AC005164, AC005548, Z98884, U29953, AC005921, |
| | | | | | Z85987, U62292, AC005911, AL023494, AC011504, AC008273, AC004890, |
| | | | | | AC006538, AC006487, AL031431, AC005746, AC005378, AC003989, |
| | | | | | AC007326, AC005908, U75285, Z49237, AC005512, AC003963, AC005377, |
| | | | | | AC005368, AC005154, AL034379, AL080250, AL031664, AL121767, |
| | | | | | AP000128, AP000206, AC007666, AC006501, AP000245, AP001053, |
| | | | | | AC009514, AC004019, AC002558, AJ239321, AD000092, AL022721, |
| | | | | | AC004033, AC005899, AC005932, AL031662, AL008725, AL049794, |
| | | | | | AC003663, AC005006, AP000553, AC009516, AC005874, AF134471, |
| | | | | | AC007055, AC002073, AL031602, AL022165, AC005089, AL049709, |
| | | | | | AC005358, AC006057, AC004552, AC004668, AC002994, AC005580, |
| | | | | | AC005390, AC005288, AL008635, AC006050, AC004859, AL035455, |
| | | | | | AC003982, AC005602, U07563, AL022320, AL035659, AF196779, AC008044, |
| | | | | | AC006014, Z82198, AC008115, AC005488, AC005581, AC005480, |
| | | | | | AC005588, U80017, AC010077, AC005722, AC005940, AL133353, |
| | | | | | AL035530, AC003101, Z46773, AC005482, AC005318, Z93241, AL031432, |
| | | | | | AL021707, AC004887, AC008179, AL133216, AC005484, AP000493, |
| | | | | | AC005529, AC005599, AF030294, AC004150, AL121653, AC005209, |
| | | | | | AC006511, AL109628, AL022396, AL049872, AP000688, Y10196, AF200923, |
| | | | | | U88317, AC005081, Z83856, AC005796, AC005387, AC006361, AC004016, |
| | | | | | Z95703, AC003958, AC005519, AP001067, AC005520, AC005231, AL078584, |
| | | | | | AC009802, AC000134, Z98048, AL031311, Z68756, AC005778, AF042484, |
| | | | | | AL078472, AC007690, AC005822, AC004253, AC004832, AL078634, |
| | | | | | AL031466, AB007872, AL096772, Z69917, AP001059, AC004678, AP001058, |
| | | | | | U07562, AL035398, AC004596, AC004891, AC004460, AC010197, |
| | | | | | AC007388, and AL133241. |
| HPFCM45 | 171 | 723501 | 1-537 | 15-551 | H14121, AI375113, AA744592, AA960851, AI298360, AW293609, |
| | | | | | AW386311, AW386307, AW379359, and AW386340. |
| HPFCM27 | 172 | 682098 | 1-537 | 15-551 | AI126345, N75862, and N22068. |
| HPFCL56 | 173 | 732601 | 1-343 | 15-357 | AA424616, AW206710, W48815, and AA284281. |
| HPFCL24 | 174 | 867889 | 1-321 | 15-335 | AI741779, AI203371, AA464709, AA725428, AA771747, U25770, and |
| | | | | | AA725175. |
| HPFCG02 | 175 | 921196 | 1-376 | 15-390 | H66442, and AC005484. |
| HPFCA01 | 176 | 928672 | 1-412 | 15-426 | T95327, AI823904, AW206324, T95680, AI369869, AI939557, and AC005531. |
| HPEBT82 | 177 | 524246 | 1-146 | 15-160 | AL040143, AA747480, C06327, AA747276, AI888365, AA502103, AA132553, |
| | | | | | AW303196, AW301350, AA310158, AW274349, AL079433, AI865364, |
| | | | | | AA747375, AI537185, AI890348, AA828704, AI434706, AI536146, AI370475, |
| | | | | | AL042420, AI306028, AC004972, AL132987, AC006017, AC004812, |
| | | | | | AC007226, AL031721, AF196779, AC002553, AL034429, AC006057, |
| | | | | | AC006965, AP001051, AC006449, AC003043, AL031650, Z83849, AC007064, |
| | | | | | AL133245, AC006160, AC006277, AC004884, AC002558, AL031602, |
| | | | | | AL132992, AL035361, AC005233, AP000556, Z98200, AC007052, AC002429, |
| | | | | | AC007546, AC018633, AC005844, L44140, AL050341, U66059, AC005250, |
| | | | | | AC002492, Z99716, AC004585, AC004028, AL021939, Z83840, AC007878, |
| | | | | | AL049757, AC005562, AL031848, AC005695, AC005324, AC007773, |
| | | | | | AC003957, AC005548, AL049776, AC008039, AC006548, AC003037, |
| | | | | | AC002485, AC005321, AC005231, AC005771, AF111167, AL049872, |
| | | | | | AP000111, AL035460, AP000961, AL133297, AL031662, AC009247, |
| | | | | | AC016025, AC005412, AC002301, AC002041, AC000081, AC007536, |
| | | | | | AL023803, AC004861, AP000557, AC009516, AC004466, AC005358, |
| | | | | | AC008045, AL008718, AL031280, Y14768, AF117829, AC007686, AC004149, |
| | | | | | AC004217, AC005971, AC003007, AB003151, AC004647, AC004150, |
| | | | | | AP000505, Z86090, AC008372, AC006362, AC002316, AC005759, AJ003147, |
| | | | | | AC002404, AC005566, AC004890, AP000501, AL133289, AC010077, |
| | | | | | AC007040, AL022329, AL022397, AF196969, AC006039, AL121603, |
| | | | | | AL023577, Z82244, Z97196, AC005632, AC005808, AC007421, AC006285, |
| | | | | | AP000344, AC009479, AC005037, AC007537, AC000353, AC005089, |
| | | | | | AL031123, AC004460, AC004913, AC004019, AP000018, AC000003, |
| | | | | | AL133163, Z95115, AC006486, and AC007227. |
| HPEBT78 | 178 | 773844 | 1-136 | 15-150 | AW339853, AW188119, AI991660, AI369596, AI494519, and N39086. |
| HPEBT68 | 179 | 753692 | 1-233 | 15-247 | T40308, AA584201, AI732378, AI872020, AW327868, AA679936, AL042853, |
| | | | | | AA847952, AA828749, AA581903, AI270559, AA478355, AL119691, |
| | | | | | AA515549, AI580250, AI963720, AW265385, AA531186, AW274349, |
| | | | | | AW002350, AA580808, AI457397, AA618452, AA503600, AI284640, |
| | | | | | AI696962, AA640410, AA640430, AI908730, AA847499, AA015846, |
| | | | | | AA682912, AI783581, AI345518, AA806796, AI754955, AW131208, |
| | | | | | AI583283, AL046409, AI358571, AL121336, AA610688, AI369580, AI732120, |
| | | | | | AW303196, AA658362, AW022406, AW264934, AA503475, AW419262, |
| | | | | | AW088846, AA631480, AI677645, AI589230, AL043719, AA623002, |
| | | | | | AI632991, AL046457, AA680243, AW301350, AA613203, AI521062, |
| | | | | | AW075511, AI350211, AA720702, AI568678, AL036037, AA483256, |
| | | | | | AL121235, AA812281, AA532700, AA491284, AA846952, AA724333, |
| | | | | | AA533303, AI431303, AI471887, AA493708, AF034184, AI570261, |
| | | | | | AW023149, AI754253, AW157608, AI745325, AA358409, AL041146, |
| | | | | | AA491814, AA503258, AI687343, AA490183, AW151713, AI298710, |
| | | | | | AA503039, AI281881, M37551, U57007, AC006039, AC006207, AC004834, |
| | | | | | AC006285, U73634, AC005531, AP000567, AL020997, AC004797, AC006539, |
| | | | | | AC007226, Z68756, AC006037, AC005598, AL121655, AL031281, AC007050, |
| | | | | | AC005081, AC005913, AC006238, AL049766, AC016025, AC007216, |
| | | | | | AC004848, AC005191, AL080243, AF161800, AC004990, AL021368, |
| | | | | | AC000353, AC007685, X75335, D83989, L49046, Z86090, AL021978, |
| | | | | | AC005754, AC005180, AF002223, AC006538, AL132992, AP000009, |
| | | | | | AC007845, AL117258, AL078621, U57004, AC005701, AL021878, AC006057, |
| | | | | | AC007160, AL023494, AB004907, U91322, AC004678, AL009028, |
| | | | | | AC004002, AC015853, AC005666, AC007370, AC004150, AC002504, |
| | | | | | AF165926, AF038458, AC004895, AL033392, AC005863, AC006449, |
| | | | | | AC005274, AC005520, AC004596, AL049759, AL022326, AB023049, |
| | | | | | AC003109, AL133163, AL022320, AF002992, U07000, AC008079, AL096808, |
| | | | | | AP000225, AL022311, AC012599, AL031722, AC008080, Z84721, AC007731, |
| | | | | | AC002465, AC005102, AC007043, AC005379, AC005500, AC000024, |
| | | | | | AL049633, AP000354, AL031255, AC004236, AL133245, AC006075, |
| | | | | | AC004556, AC006160, U57008, AL021877, AF217403, AC004021, AC007999, |
| | | | | | AL135744, AC005363, AP000556, AC007270, AL022302, AR036572, U91328, |
| | | | | | AL132712, AC004019, AL078603, AC005255, AC005037, AC005067, |
| | | | | | AC004913, AC005242, AL031657, AC005258, AL049539, AC005632, |
| | | | | | AC004643, AC002301, U82696, AJ246003, AP000150, AC005566, AC006011, |
| | | | | | AC004638, U95742, AC016026, AC004671, Z82190, AC006023, AC006270, |
| | | | | | AL080238, AC003075, AC007064, AC006597, AC006540, Z98050, Z95152, |
| | | | | | AC005071, D87008, AL109628, AC007537, AC004859, X69907, AC004944, |
| | | | | | AL049743, AC004485, AL035423, AC005091, AL034430, AC009247, |
| | | | | | AF015148, AC005015, AC006958, AP000344, Z98044, AL049696, AL132777, |
| | | | | | AP000356, AF045555, AC006474, AC004254, AL023876, AF015153, Z79997, |
| | | | | | AF042090, AL121658, AC010436, AC007751, AC005920, X55926, AP000114, |
| | | | | | AP000046, D83253, AC006042, AL133289, X54180, U18391, Z99754, |
| | | | | | U18392, U57006, U18394, U18395, X55925, U57005, X54179, AP000359, |
| | | | | | AL023879, AC006241, D88268, AC006453, X55929, AC003070, AC007066, |
| | | | | | X55933, AC005088, AC004854, AC003104, AC004802, AP000303, AP000557, |
| | | | | | AC005516, AC005399, AC009405, AC002395, AL049825, AL022724, |
| | | | | | AL133382, AL031228, AL035681, AL022328, AC005013, AC005600, |
| | | | | | AC002412, AC006327, Z95331, AC005212, Z98744, AC008041, AC004051, |
| | | | | | AC002067, AL035072, Z99716, AL109759, AP000563, AC007546, AL022322, |
| | | | | | AL034549, U67825, AL078611, AC004463, AL031587, and Z93930. |
| HPEBT54 | 180 | 731002 | 1-385 | 15-399 | |
| HPEBT49 | 181 | 530021 | 1-372 | 15-386 | AC005089, AC005940, U91323, AC005666, AC007546, and AC003093, |
| HPEBT34 | 182 | 706836 | 1-358 | 15-372 | |
| HPEBT14 | 183 | 535061 | 1-235 | 15-249 | AW179046, AL133500, and AC003071. |
| HPEBT07 | 184 | 954214 | 1-303 | 15-317 | AC002351, AC005875, AL022326, and AC006312. |
| HPEBO67 | 185 | 578516 | 1-216 | 15-230 | H78283, AI127890, AW090182, AW001838, W72897, and AF086351. |
| HPEBL08 | 186 | 960240 | 1-408 | 15-422 | AI021894, AI359246, AI422145, AI800895, AI689642, T89411, and |
| | | | | | AC007684. |
| HPEBH01 | 187 | 921767 | 1-333 | 15-347 | AA019103. |
| HPEBG89 | 188 | 785942 | 1-505 | 15-519 | AA425851, and AA425691. |
| HPEBG10 | 189 | 867888 | 1-271 | 15-285 | AA533740, and AI984425. |
| HPEBA89 | 190 | 910250 | 1-490 | 15-504 | AA758474. |
| HPEBA61 | 191 | 742251 | 1-74 | 15-88 | AC007036. |
| HPEBA05 | 192 | 928027 | 1-357 | 15-371 | AI217338. |
| HPEAG43 | 193 | 468542 | 1-485 | 15-499 | AA634147, AA837087, N63746, AC006197, AL031311, AC006079, |
| | | | | | AL035555, AC004790, AL031670, AL022727, AC002457, AL096803, |
| | | | | | AL049874, Z98048, AC005881, AC003663, and AE000659. |
| HPEAD72 | 194 | 761472 | 1-371 | 15-385 | H24817. |
| HPEAB12 | 195 | 968847 | 1-498 | 15-512 | AI656658, AI991597, AI962317, AW204277, and AI963904. |
| HPEAA57 | 196 | 514231 | 1-441 | 15-455 | AC008039. |
| HPEAA40 | 197 | 867899 | 1-332 | 15-346 | AA879011. |
| HL3AG56 | 198 | 786383 | 1-419 | 15-433 | R44606, AW148952, AA548521, AI742434, AA349392, AI521973, R05501, |
| | | | | | AI357400, AI420608, AI016104, AI041055, AW205062, T09023, AA481840, |
| | | | | | and R05608. |
| HL3AC02 | 199 | 921152 | 1-411 | 15-425 | AI566793, and R01086. |
| HL3AB26 | 200 | 685005 | 1-373 | 15-387 | H81713. |
| HL2AD32 | 201 | 699746 | 1-431 | 15-445 | AI215797, AA768734, AI685170, N33032, AL134235, and AL096773. |
| HL2AB67 | 202 | 774114 | 1-494 | 15-508 | AA121889. |
| HL1SA13 | 203 | 621397 | 1-369 | 15-383 | T62860, AA855099, AI038391, AI123781, AW002718, AI374702, H72034, |
| | | | | | AA972856, AC005746, and AC005884. |
| HL1AN46 | 204 | 522981 | 1-396 | 15-410 | AA991380. |
| HBZSK04 | 205 | 926407 | 1-65 | 15-79 | |
| HBZSG02 | 206 | 920249 | 1-414 | 15-428 | AI733802, AI733182, AA948110, and AI261960. |
| HBZSD32 | 207 | 699335 | 1-415 | 15-429 | |
| HBZAJ73 | 208 | 764479 | 1-489 | 15-503 | R84573, R88849, H50890, and X69908. |
| HBZAJ26 | 209 | 681879 | 1-640 | 15-654 | W93922, and AF080623. |
| HBZAI39 | 210 | 847621 | 1-1325 | 15-1339 | T56623, T57310, AI499938, AA601218, AI679782, AI284640, AL043009, |
| | | | | | AL046409, AI963720, AI334443, AA610491, AW303196, AL079645, |
| | | | | | AI431303, AW301350, C75026, AW193265, AA630362, AI471534, AI270117, |
| | | | | | AW406755, AA521323, AA631507, AI471543, AW327868, AA669840, |
| | | | | | AW274349, AI350211, AW419262, AI860020, AI345681, AI345675, |
| | | | | | AA394271, AL119691, AI567076, AI912322, AI613280, AI732120, AI206785, |
| | | | | | AI683577, AI569086, AW243960, AW088846, AI143242, AI469624, |
| | | | | | AI005388, AL042856, AI312309, AI358229, AI262909, AA680243, |
| | | | | | AW338086, AA521399, AW131249, AW439558, AW276827, AW408717, |
| | | | | | AL048925, AI469968, AA584752, AW069481, AI061334, AI471481, |
| | | | | | AW270270, AA682912, AL042420, AL138455, AI537955, AI561060, |
| | | | | | AI281881, AA491814, AI371070, AI571512, AA127353, AL042753, |
| | | | | | AI298710, AI345654, AI937850, AA569471, AI151261, AI619997, AI623898, |
| | | | | | AI688846, F36273, AI336660, AI085719, AW167267, AI049634, AI053672, |
| | | | | | AW167372, AW193432, AI365988, AI079910, AI286356, AL044940, |
| | | | | | AW406162, AL041706, AA133986, AW407578, AI148277, AL138265, |
| | | | | | AW023672, AI375710, AL037683, AI110844, AI670124, AI865905, N35896, |
| | | | | | AI357551, AI954260, AA074130, AI110770, AI754658, AA649642, AI635818, |
| | | | | | AI282832, AA490183, AW162489, AA714453, AW406659, AI110760, |
| | | | | | AI434695, AA780515, AI246119, AI287651, AI435544, AI344844, AA350859, |
| | | | | | AI801591, AI053786, AL043719, AW276817, AI305547, AA226153, |
| | | | | | AI744995, AI859742, H71429, W79504, AA192740, AW410400, AI951863, |
| | | | | | AW073470, AL119984, AW247819, AL041690, AI610920, AW276435, |
| | | | | | AI640702, AW021917, AI888752, AA178953, AI610159, AI279165, AI358343, |
| | | | | | AI038833, AI761471, F29989, AW339568, AW302013, AA587256, AA713815, |
| | | | | | AL120687, AI590689, AI590958, AI355224, AI499503, AA226715, U95742, |
| | | | | | AC007216, AC006948, AC007066, AC007055, AC002115, AC007387, |
| | | | | | AL022323, Z94721, AP000135, AL023284, AJ003147, AC004463, AC005620, |
| | | | | | AL022237, AC007664, AL049569, AC005041, AP000031, AC005696, |
| | | | | | AC002472, AC002375, AC012384, AC005488, AF067844, AC006014, |
| | | | | | AL034423, Z82244, AC003689, AL049780, AC007242, AC004974, AL031680, |
| | | | | | AC005104, AC002119, AL031311, AP000044, AP000112, AC005914, |
| | | | | | AC005971, U47924, AF196779, AC005182, AC010349, AJ246003, AC005217, |
| | | | | | AC003101, AL035417, AC006064, AC007279, AC005527, AC005412, |
| | | | | | AL121603, Z84488, AC005043, AL121655, AC004000, AC006251, AC005902, |
| | | | | | Z74617, Y07848, AC006271, AC008009, L78810, AC004967, AL049709, |
| | | | | | AC002565, AL133382, AC002059, AC005619, AC004125, AL110502, |
| | | | | | AC004491, AL031075, AC005932, AC005529, AL121658, AF049895, |
| | | | | | AC004776, AC004686, AC004061, Z68276, AL031668, AC005399, AL021707, |
| | | | | | AL021546, AC004858, AC000026, AC005356, AL031673, AC015853, |
| | | | | | AC007011, AC005280, AL022322, AC005786, AC007240, AL133445, |
| | | | | | AC004963, AC005076, AL132985, AC005300, AC006449, AF002223, |
| | | | | | AC006019, AC018633, AC007546, AL008715, Z49236, AF135028, AC002316, |
| | | | | | AC008372, AC005531, AC000025, Z97989, AC006480, AL096791, AC002301, |
| | | | | | AF217403, AC004526, AC004020, AC005231, AL132712, AC005520, |
| | | | | | AC004703, AC006030, AC005330, AC008044, AC004841, AL035079, |
| | | | | | AC005832, AL035685, AP000503, AL031733, AC000159, AC005486, |
| | | | | | AC005618, AC008115, AC003003, AL133353, Z97054, AL035422, AC004539, |
| | | | | | AC005291, AC000052, AL133245, Z81450, AC007192, AC004652, AF129756, |
| | | | | | Z82202, U78027, AC005202, Z86061, AL109798, AL031588, AC004382, |
| | | | | | AC004585, AC006112, AF109907, AL034429, AC006130, AC004019, |
| | | | | | AC005015, AC004659, AF107885, AL078477, AC007040, AF165926, |
| | | | | | AC004876, AC004181, AJ251973, Z85987, AL121652, AL031255, AL021391, |
| | | | | | AC005740, AC004236, AC004990, AL133371, AC006441, AL022328, |
| | | | | | AC008014, AC002045, AC005071, AC006160, AC005764, AL008718, |
| | | | | | AL035072, AC002364, AP000477, AC004816, X60459, AP000297, AP001172, |
| | | | | | AL035587, AC003678, AC004883, AL031848, AC004030, Y14768, AF134726, |
| | | | | | AL050306, AL020993, AC002425, AC005784, AC005480, AL031602, |
| | | | | | AC004217, AC006965, AC005355, AL034452, AP000692, AL009179, |
| | | | | | AC005057, AC005899, AC008101, AC000072, AC005664, AC005778, |
| | | | | | Z83822, AC004517, AL031277, AC005803, AC002350, U07563, AL049872, |
| | | | | | AC007684, AC006116, AL022329, AC006953, AC004408, AF190465, |
| | | | | | AC006544, AJ006996, AC002492, AL049845, AF108083, AC002126, |
| | | | | | AL008582, Z83845, Z95114, AC005200, AC004087, AC003684, AP000506, |
| | | | | | AP000505, AC004865, AC000353, and AC004859. |
| HBZAI14 | 211 | 847620 | 1-512 | 15-526 | |
| HBZAB15 | 212 | 660348 | 1-413 | 15-427 | AA079443. |
| HBZAB08 | 213 | 959560 | 1-449 | 15-463 | AI806340, AI347581, AW058265, AI149706, AA858304, AA416860, |
| | | | | | AA910678, AA470052, AI674598, and AA887474. |

[0083] TABLE 4

| | | | | Cell | | |
|---|---|---|---|---|---|---|
| Code | Description | Tissue | Organ | Line | Disease | Vector |
| AR022 | a_Heart | a_Heart | | | | |
| AR023 | a_Liver | a_Liver | | | | |
| AR024 | a_mammary gland | a_mammary gland | | | | |
| AR025 | a_Prostate | a_Prostate | | | | |
| AR026 | a_small intestine | a_small intestine | | | | |
| AR027 | a_Stomach | a_Stomach | | | | |
| AR028 | Blood B cells | Blood B cells | | | | |
| AR029 | Blood B cells activated | Blood B cells | | | | |
| | | activated | | | | |
| AR030 | Blood B cells resting | Blood B cells | | | | |
| | | resting | | | | |
| AR031 | Blood T cells activated | Blood T cells | | | | |
| | | activated | | | | |
| AR032 | Blood T cells resting | Blood T cells resting | | | | |
| AR033 | brain | brain | | | | |
| AR034 | breast | breast | | | | |
| AR035 | breast cancer | breast cancer | | | | |
| AR036 | Cell Line CAOV3 | Cell Line CAOV3 | | | | |
| AR037 | cell line PA-1 | cell line PA-1 | | | | |
| AR038 | cell line transformed | cell line transformed | | | | |
| AR039 | colon | colon | | | | |
| AR040 | colon (9808co65R) | colon (9808co65R) | | | | |
| AR041 | colon (9809co15) | colon (9809co15) | | | | |
| AR042 | colon cancer | colon cancer | | | | |
| AR043 | colon cancer (9808co64R) | colon cancer | | | | |
| | | (9808co64R) | | | | |
| AR044 | colon cancer 9809co14 | colon cancer | | | | |
| | | 9809co14 | | | | |
| AR045 | corn clone 5 | corn clone 5 | | | | |
| AR046 | corn clone 6 | corn clone 6 | | | | |
| AR047 | corn clone 2 | corn clone 2 | | | | |
| AR048 | corn clone 3 | corn clone 3 | | | | |
| AR049 | Corn Clone 4 | Corn Clone 4 | | | | |
| AR050 | Donor II B Cells 24 hrs | Donor II B Cells | | | | |
| | | 24 hrs | | | | |
| AR051 | Donor II B Cells 72 hrs | Donor II B Cells | | | | |
| | | 72 hrs | | | | |
| AR052 | Donor II B-Cells 24 hrs. | Donor II B-Cells 24 hrs. | | | | |
| AR053 | Donor II B-Cells 72 hrs | Donor II B-Cells | | | | |
| | | 72 hrs | | | | |
| AR054 | Donor II Resting B Cells | Donor II Resting B | | | | |
| | | Cells | | | | |
| AR055 | Heart | Heart | | | | |
| AR056 | Human Lung (clonetech) | Human Lung | | | | |
| | | (clonetech) | | | | |
| AR057 | Human Mammary | Human Mammary | | | | |
| | (clontech) | (clontech) | | | | |
| AR058 | Human Thymus | Human Thymus | | | | |
| | (clonetech) | (clonetech) | | | | |
| AR059 | Jurkat (unstimulated) | Jurkat | | | | |
| | | (unstimulated) | | | | |
| AR060 | Kidney | Kidney | | | | |
| AR061 | Liver | Liver | | | | |
| AR062 | Liver (Clontech) | Liver (Clontech) | | | | |
| AR063 | Lymphocytes chronic | Lymphocytes | | | | |
| | lymphocytic leukaemia | chronic lymphocytic | | | | |
| | | leukaemia | | | | |
| AR064 | Lymphocytes diffuse large | Lymphocytes | | | | |
| | B cell lymphoma | diffuse large B cell | | | | |
| | | lymphoma | | | | |
| AR065 | Lymphocytes follicular | Lymphocytes | | | | |
| | lymphoma | follicular lymphoma | | | | |
| AR066 | normal breast | normal breast | | | | |
| AR067 | Normal Ovarian | Normal Ovarian | | | | |
| | (4004901) | (400490l) | | | | |
| AR068 | Normal Ovary 9508G045 | Normal Ovary | | | | |
| | | 9508G045 | | | | |
| AR069 | Normal Ovary 9701G208 | Normal Ovary | | | | |
| | | 9701G208 | | | | |
| AR070 | Normal Ovary 9806G005 | Normal Ovary | | | | |
| | | 9806G005 | | | | |
| AR071 | Ovarian Cancer | Ovarian Cancer | | | | |
| AR072 | Ovarian Cancer | Ovarian Cancer | | | | |
| | (9702G001) | (9702G001) | | | | |
| AR073 | Ovarian Cancer | Ovarian Cancer | | | | |
| | (9707G029) | (9707G029) | | | | |
| AR074 | Ovarian Cancer | Ovarian Cancer | | | | |
| | (9804G011) | (9804G011) | | | | |
| AR075 | Ovarian Cancer | Ovarian Cancer | | | | |
| | (9806G019) | (9806G019) | | | | |
| AR076 | Ovarian Cancer | Ovarian Cancer | | | | |
| | (9807G017) | (9807G017) | | | | |
| AR077 | Ovarian Cancer | Ovarian Cancer | | | | |
| | (9809G001) | (9809G001) | | | | |
| AR078 | ovarian cancer 15799 | ovarian cancer | | | | |
| | | 15799 | | | | |
| AR079 | Ovarian Cancer | Ovarian Cancer | | | | |
| | 17717AID | 17717AID | | | | |
| AR080 | Ovarian Cancer | Ovarian Cancer | | | | |
| | 4004664B1 | 4004664B1 | | | | |
| AR081 | Ovarian Cancer | Ovarian Cancer | | | | |
| | 4005315A1 | 4005315A1 | | | | |
| AR082 | ovarian cancer 94127303 | ovarian cancer | | | | |
| | | 94127303 | | | | |
| AR083 | Ovarian Cancer 96069304 | Ovarian Cancer | | | | |
| | | 96069304 | | | | |
| AR084 | Ovarian Cancer 9707G029 | Ovarian Cancer | | | | |
| | | 9707G029 | | | | |
| AR085 | Ovarian Cancer 9807G045 | Ovarian Cancer | | | | |
| | | 9807G045 | | | | |
| AR086 | ovarian cancer 9809G001 | ovarian cancer | | | | |
| | | 9809G001 | | | | |
| AR087 | Ovarian Cancer | Ovarian Cancer | | | | |
| | 9905C032RC | 9905C032RC | | | | |
| AR088 | Ovarian cancer 9907 C00 | Ovarian cancer 9907 | | | | |
| | 3rd | C00 3rd | | | | |
| AR089 | Prostate | Prostate | | | | |
| AR090 | Prostate (clonetech) | Prostate (clonetech) | | | | |
| AR091 | prostate cancer | prostate cancer | | | | |
| AR092 | prostate cancer #15176 | prostate cancer | | | | |
| | | #15176 | | | | |
| AR093 | prostate cancer #15509 | prostate cancer | | | | |
| | | #15509 | | | | |
| AR094 | prostate cancer #15673 | prostate cancer | | | | |
| | | #15673 | | | | |
| AR095 | Small Intestine (Clontech) | Small Intestine | | | | |
| | | (Clontech) | | | | |
| AR096 | Spleen | Spleen | | | | |
| AR097 | Thymus T cells activated | Thymus T cells | | | | |
| | | activated | | | | |
| AR098 | Thymus T cells resting | Thymus T cells | | | | |
| | | resting | | | | |
| AR099 | Tonsil | Tonsil | | | | |
| AR100 | Tonsil geminal center | Tonsil geminal | | | | |
| | centroblast | center centroblast | | | | |
| AR101 | Tonsil germinal center B | Tonsil germinal | | | | |
| | cell | center B cell | | | | |
| AR102 | Tonsil lymph node | Tonsil lymph node | | | | |
| AR103 | Tonsil memory B cell | Tonsil memory B | | | | |
| | | cell | | | | |
| AR104 | Whole Brain | Whole Brain | | | | |
| AR105 | Xenograft ES-2 | Xenograft ES-2 | | | | |
| AR106 | Xenograft SW626 | Xenograft SW626 | | | | |
| H0130 | LNCAP untreated | LNCAP Cell Line | Prostate | Cell Line | | Uni-ZAP |
| | | | | | | XR |
| H0131 | LNCAP + 0.3 nM R1881 | LNCAP Cell Line | Prostate | Cell Line | | Uni-ZAP |
| | | | | | | XR |
| H0132 | LNCAP + 30 nM R1881 | LNCAP Cell Line | Prostate | Cell Line | | Uni-ZAP |
| | | | | | | XR |
| H0165 | Human Prostate Cancer, | Human Prostate | Prostate | | disease | Uni-ZAP |
| | Stage B2 | Cancer, stage B2 | | | | XR |
| H0166 | Human Prostate Cancer, | Human Prostate | Prostate | | disease | Uni-ZAP |
| | Stage B2 fraction | Cancer, stage B2 | | | | XR |
| H0168 | Human Prostate Cancer, | Human Prostate | Prostate | | disease | Uni-ZAP |
| | Stage C | Cancer, stage C | | | | XR |
| H0169 | Human Prostate Cancer, | Human Prostate | Prostate | | disease | Uni-ZAP |
| | Stage C fraction | Cancer, stage C | | | | XR |
| H0207 | LNCAP, differential | LNCAP Cell Line | Prostate | Cell Line | | pBluescript |
| | expression | | | | | |
| H0383 | Human Prostate BPH, re- | Human Prostate | | | | Uni-ZAP |
| | excision | BPH | | | | XR |
| S0136 | PERM TF274 | stromal cell | Bone | Cell Line | | Lambda |
| | | | marrow | | | ZAP II |
| S0150 | LNCAP prostate cell line | LNCAP Cell Line | Prostate | Cell Line | | Uni-ZAP |
| | | | | | | XR |
| S0152 | PC3 Prostate cell line | PC3 prostate cell | | | | Uni-ZAP |
| | | line | | | | XR |
| S0168 | Prostate/LNCAP, | PC3 prostate cell | | | | pBluescript |
| | subtraction I | line | | | | |
| S0188 | Prostate, BPH, Lib 2 | Human Prostate | | | disease | pSport1 |
| | | BPH | | | | |
| S0190 | Prostate BPH,Lib 2, | Human Prostate | | | | pSport1 |
| | subtracted | BPH | | | | |
| T0091 | Liver, hepatocellular | | | | | pBluescript |
| | carcinoma | | | | | SK- |
| L0070 | Selected chromosome 21 | | | | | |
| | cDNA library | | | | | |
| L0365 | NCI_CGAP_Phe1 | pheochromocytoma | | | | Bluescript |
| | | | | | | SK- |
| L0435 | Infant brain, LLNL array | | | | | lafmid BA |
| | of Dr. M. Soares 1NIB | | | | | |
| L0438 | normalized infant brain | total brain | brain | | | lafmid BA |
| | cDNA | | | | | |
| L0439 | Soares infant brain 1NIB | | whole brain | | | Lafmid BA |
| L0519 | NCI_CGAP_Pr3 | | | | | pAMP10 |
| L0526 | NCI_CGAP_Pr12 | metastatic prostate | | | | pAMP10 |
| | | bone lesion | | | | |
| L0532 | NCI_CGAP_Thy1 | thyroid | | | | pAMP10 |
| L0542 | NCI_CGAP_Pr11 | normal prostatic | prostate | | | pAMP10 |
| | | epithelial cells | | | | |
| L0586 | HTCDL1 | | | | | pBluescript |
| | | | | | | SK(-) |
| L0587 | Stratagene colon HT29 | | | | | pBluescript |
| | (#937221) | | | | | SK- |
| L0589 | Stratagene fetal retina | | | | | pBluescript |
| | 937202 | | | | | SK- |
| L0592 | Stratagene hNT neuron | | | | | pBluescript |
| | (#937233) | | | | | SK- |
| L0598 | Morton Fetal Cochlea | cochlea | ear | | | pBluescript |
| | | | | | | SK- |
| L0599 | Stratagene lung (#937210) | | lung | | | pBluescript |
| | | | | | | SK- |
| L0601 | Stratagene pancreas | pancreas | | | | pBluescript |
| | (#937208) | | | | | SK- |
| L0604 | Stratagene muscle 937209 | muscle | skeletal | | | pBluescript |
| | | | muscle | | | SK- |
| L0605 | Stratagene fetal spleen | fetal spleen | spleen | | | pBluescript |
| | (#937205) | | | | | SK- |
| L0665 | NCI_CGAP_Ut4 | serous papillary | uterus | | | pCMV- |
| | | carcinoma, high | | | | SPORT6 |
| | | grade, 2 pooled t | | | | |
| L0667 | NCI_CGAP_CML1 | myeloid cells, 18 | whole blood | | | pCMV- |
| | | pooled CML cases, | | | | SPORT6 |
| | | BCR/ABL rearra | | | | |
| L0717 | Gessler Wilms tumor | | | | | pSPORT1 |
| L0731 | Soares_pregnant_uterus_NbHPU | | uterus | | | pT7T3-Pac |
| L0740 | Soares melanocyte | melanocyte | | | | pT7T3D |
| | 2NbHM | | | | | (Pharmacia) |
| | | | | | | with a |
| | | | | | | modified |
| | | | | | | polylinker |
| L0741 | Soares adult-brain | | brain | | | pT7T3D |
| | N2b4HB55Y | | | | | (Pharmacia) |
| | | | | | | with a |
| | | | | | | modified |
| | | | | | | polylinker |
| L0743 | Soares breast 2NbHBst | | breast | | | pT7T3D |
| | | | | | | (Pharmacia) |
| | | | | | | with a |
| | | | | | | modified |
| | | | | | | polylinker |
| L0744 | Soares breast 3NbHBst | | breast | | | pT7T3D |
| | | | | | | (Pharmacia) |
| | | | | | | with a |
| | | | | | | modified |
| | | | | | | polylinker |
| L0745 | Soares retina N2b4HR | retina | eye | | | pT7T3D |
| | | | | | | (Pharmacia) |
| | | | | | | with a |
| | | | | | | modified |
| | | | | | | polylinker |
| L0747 | Soares_fetal_heart_NbHH | | heart | | | pT7T3D |
| | 19W | | | | | (Pharmacia) |
| | | | | | | with a |
| | | | | | | modified |
| | | | | | | polylinker |
| L0748 | Soares fetal liver spleen | | Liver and | | | pT7T3D |
| | INFLS | | Spleen | | | (Pharmacia) |
| | | | | | | with a |
| | | | | | | modified |
| | | | | | | polylinker |
| L0749 | Soares_fetal_liver_spleen_INFLS_S1 | | Liver and | | | pT7T3D |
| | | | Spleen | | | (Pharmacia) |
| | | | | | | with a |
| | | | | | | modified |
| | | | | | | polylinker |
| L0750 | Soares_fetal_lung_NbHL1 | | lung | | | pT7T3D |
| | 9W | | | | | (Pharmacia) |
| | | | | | | with a |
| | | | | | | modified |
| | | | | | | polylinker |
| L0751 | Soares ovary tumor | ovarian tumor | ovary | | | pT7T3D |
| | NbHOT | | | | | (Pharmacia) |
| | | | | | | with a |
| | | | | | | modified |
| | | | | | | polylinker |
| L0752 | Soares_parathyroid_tumor_NbHPA | parathyroid tumor | parathyroid | | | pT7T3D |
| | | | gland | | | (Pharmacia) |
| | | | | | | with a |
| | | | | | | modified |
| | | | | | | polylinker |
| L0754 | Soares placenta Nb2HP | | placenta | | | pT7T3D |
| | | | | | | (Pharmacia) |
| | | | | | | with a |
| | | | | | | modified |
| | | | | | | polylinker |
| L0756 | Soares_multiple_sclerosis_2NbHMSP | multiple sclerosis | | | | pT7T3D |
| | | lesions | | | | (Pharmacia) |
| | | | | | | with a |
| | | | | | | modified |
| | | | | | | polylinker |
| | | | | | | V_TYPE |
| L0758 | Soares_testis_NHT | | | | | pT7T3D-Pac |
| | | | | | | (Pharmacia) |
| | | | | | | with a |
| | | | | | | modified |
| | | | | | | polylinker |
| L0759 | Soares_total_fetus_Nb2H | | | | | pT7T3D-Pac |
| | F8_9w | | | | | (Pharmacia) |
| | | | | | | with a |
| | | | | | | modified |
| | | | | | | polylinker |
| L0763 | NCI_CGAP_Br2 | breast | | | | pT7T3D-Pac |
| | | | | | | (Pharmacia) |
| | | | | | | with a |
| | | | | | | modified |
| | | | | | | polylinker |
| L0766 | NCI_CGAP_GCB1 | germinal center B | | | | pT7T3D-Pac |
| | | cell | | | | (Pharmacia) |
| | | | | | | with a |
| | | | | | | modified |
| | | | | | | polylinker |
| L0769 | NCI_CGAP_Brn25 | anaplastic | brain | | | pT7T3D-Pac |
| | | oligodendroglioma | | | | (Pharmacia) |
| | | | | | | with a |
| | | | | | | modified |
| | | | | | | polylinker |
| L0770 | NCI_CGAP_Brn23 | glioblastoma | brain | | | pT7T3D-Pac |
| | | (pooled) | | | | (Pharmacia) |
| | | | | | | with a |
| | | | | | | modified |
| | | | | | | polylinker |
| L0771 | NCI_CGAP_Co8 | adenocarcinoma | colon | | | pT7T3D-Pac |
| | | | | | | (Pharmacia) |
| | | | | | | with a |
| | | | | | | modified |
| | | | | | | polylinker |
| L0774 | NCI_CGAP_Kid3 | | kidney | | | pT7T3D-Pac |
| | | | | | | (Pharmacia) |
| | | | | | | with a |
| | | | | | | modified |
| | | | | | | polylinker |
| L0775 | NCI_CGAP_Kid5 | 2 pooled tumors | kidney | | | pT7T3D-Pac |
| | | (clear cell type) | | | | (Pharmacia) |
| | | | | | | with a |
| | | | | | | modified |
| | | | | | | polylinker |
| L0776 | NCI_CGAP_Lu5 | carcinoid | lung | | | pT7T3D-Pac |
| | | | | | | (Pharmacia) |
| | | | | | | with a |
| | | | | | | modified |
| | | | | | | polylinker |
| L0777 | Soares_NhHMPu_S1 | Pooled human | mixed (see | | | pT7T3D-Pac |
| | | melanocyte, fetal | below) | | | (Pharmacia) |
| | | heart, and pregnant | | | | with a |
| | | | | | | modified |
| | | | | | | polylinker |
| L0779 | Soares_NFL_T_GBC_S1 | | pooled | | | pT7T3D-Pac |
| | | | | | | (Pharmacia) |
| | | | | | | with a |
| | | | | | | modified |
| | | | | | | polylinker |
| L0780 | Soares_NSF_F8_9W_OT_PA_P_S1 | | pooled | | | pT7T3D-Pac |
| | | | | | | (Pharmacia) |
| | | | | | | with a |
| | | | | | | modified |
| | | | | | | polylinker |
| L0783 | NCI_CGAP_Pr22 | normal prostate | prostate | | | pT7T3D-Pac |
| | | | | | | (Pharmacia) |
| | | | | | | with a |
| | | | | | | modified |
| | | | | | | polylinker |
| L0790 | NCI_CGAP_Sub4 | | | | | pT7T3D-Pac |
| | | | | | | (Pharmacia) |
| | | | | | | with a |
| | | | | | | modified |
| | | | | | | polylinker |
| L0794 | NCI_CGAP_GC6 | pooled germ cell | | | | pT7T3D-Pac |
| | | tumors | | | | (Pharmacia) |
| | | | | | | with a |
| | | | | | | modified |
| | | | | | | polylinker |
| L0809 | NCI_CGAP_Pr28 | | prostate | | | pT7T3D-Pac |
| | | | | | | (Pharmacia) |
| | | | | | | with a |
| | | | | | | modified |
| | | | | | | polylinker |

[0084] TABLE 5

| OMIM | |
|---|---|
| Reference | Description |
| 103050 | Autism, succinylpurinemic |
| 103050 | Adenylosuccinase deficiency |
| 106300 | Ankylosing spondylitis |
| 108800 | Atrial septal defect, secundum type |
| 120290 | OSMED syndrome, 215150 |
| 120290 | Stickler syndrome, type II, 184840 |
| 120435 | Muir-Torre syndrome, 158320 |
| 120435 | Colorectal cancer, hereditary, nonpolyposis, |
| | type 1 Ovarian cancer |
| 120810 | C4 deficiency |
| 120820 | C4 deficiency |
| 124030 | Parkinsonism, susceptibility to |
| 124030 | Debrisoquine sensitivity |
| 126600 | Drusen, radial, autosomal dominant |
| 134580 | Factor XIIIB deficiency |
| 135300 | Fibromatosis, gingival |
| 136435 | Ovarian dysgenesis, hypergonadotropic, |
| | with normal karyotype, 233300 |
| 138981 | Pulmonary alveolar proteinosis, 265120 |
| 142857 | Pemphigoid, susceptibility to |
| 142858 | Beryllium disease, chronic, susceptibility to |
| 145260 | Pseudohypoaldosteronism, type II |
| 150270 | Laryngeal adductor paralysis |
| 152790 | Precocious puberty, male, 176410 |
| 152790 | Leydig cell hypoplasia |
| 157170 | Holoprosencephaly-2 |
| 167250 | Paget disease of bone |
| 170261 | Bare lymphocyte syndrome, type I, due to |
| | TAP2 deficiency |
| 177900 | Psoriasis susceptibility-1 |
| 179450 | Ragweed sensitivity |
| 179605 | Retinitis pigmentosa, digenic |
| 179605 | Retinitis pigmentosa-7, peripherin-related |
| 179605 | Retinitis punctata albescens |
| 179605 | Butterfly dystrophy, retinal |
| 179605 | Macular dystrophy |
| 180297 | Anemia, hemolytic, Rh-null, suppressor type, |
| | 268150 |
| 182380 | Glucose/galactose malabsorption |
| 182601 | Spastic paraplegia-4 |
| 188826 | Sorsby fundus dystrophy, 136900 |
| 190040 | Dermatofibrosarcoma protuberans |
| 190040 | Giant-cell fibroblastoma |
| 190040 | Meningioma, SIS-related |
| 201910 | Adrenal hyperplasia, congenital, due to |
| | 21-hydroxylase deficiency |
| 217000 | C2 deficiency |
| 222100 | Diabetes mellitus, insulin-dependent-1 |
| 233100 | [Renal glucosuria] |
| 235200 | Hemochromatosis |
| 248611 | Maple syrup urine disease, type Ib |
| 256550 | Sialidosis, type I |
| 256550 | Sialidosis, type II |
| 263200 | Polycystic kidney disease, autosomal recessive |
| 278300 | Xanthinuria, type I |
| 600105 | Retinitis pigmentosa-12, autosomal recessive |
| 600202 | Dyslexia, specific, 2 |
| 600261 | Ehlers-Danlos-like syndrome |
| 600364 | Cone dystrophy-3, 602093 |
| 600759 | Alzheimer disease-4 |
| 601071 | Deafness, autosomal recessive 9 |
| 601498 | Peroxisomal biogenesis disorder, complementation |
| | group 4 |
| 601690 | Platelet-activating factor acetylhydrolase |
| | deficiency |
| 601771 | Glaucoma 3A, primary infantile, 231300 |
| 601868 | Deafness, autosomal dominant 13 |
| 601975 | Ectodermal dysplasia/skin fragility syndrome |
| 602134 | Tremor, familial essential, 2 |
| 602280 | Retinitis pigmentosa-14, 600132 |
| 602475 | Ossification of posterior longitudinal ligament |
| | of spine |

### Polynucleotide and Polypeptide Variants

[0085] The present invention is also directed to variants of the prostate cancer associated polynucleotide sequence disclosed in SEQ ID NO:X or the complementary strand thereto, nucleotide sequences encoding the polypeptide of SEQ ID NO:Y, the nucleotide sequence of SEQ ID NO:X encoding the polypeptide sequence as defined in column 6 of Table 1A, nucleotide sequences encoding the polypeptide as defined in column 6 of Table 1A, the nucleotide sequence as defined in columns 8 and 9 of Table 2, nucleotide sequences encoding the polypeptide encoded by the nucleotide sequence as defined in columns 8 and 9 of Table 2, the nucleotide sequence as defined in column 6 of Table 1B, nucleotide sequences encoding the polypeptide encoded by the nucleotide sequence as defined in column 6 of Table 1B, the cDNA sequence contained in Clone ID NO:Z, and/or nucleotide sequences encoding a polypeptide encoded by the cDNA sequence contained in Clone ID NO:Z.

[0086] The present invention also encompasses variants of the polypeptide sequence disclosed in SEQ ID NO:Y, a polypeptide sequence as defined in column 6 of Table 1A, a polypeptide sequence encoded by the polynucleotide sequence in SEQ ID NO:X, a polypeptide sequence encoded by the nucleotide sequence as defined in columns 8 and 9 of Table 2, a polypeptide sequence encoded by the nucleotide sequence as defined in column 6 of Table 1B, a polypeptide sequence encoded by the complement of the polynucleotide sequence in SEQ ID NO:X, and/or a polypeptide sequence encoded by the cDNA sequence contained in Clone ID NO:Z.

[0087] “Variant” refers to a polynucleotide or polypeptide differing from the polynucleotide or polypeptide of the present invention, but retaining essential properties thereof. Generally, variants are overall closely similar, and, in many regions, identical to the polynucleotide or polypeptide of the present invention.

[0088] Thus, one aspect of the invention provides an isolated nucleic acid molecule comprising, or alternatively consisting of, a polynucleotide having a nucleotide sequence selected from the group consisting of: (a) a nucleotide sequence described in SEQ ID NO:X or contained in the cDNA sequence of Clone ID NO:Z; (b) a nucleotide sequence in SEQ ID NO:X or the cDNA in Clone ID NO:Z which encodes a mature prostate cancer associated polypeptide; (c) a nucleotide sequence in SEQ ID NO:X or the cDNA sequence of Clone ID NO:Z, which encodes a biologically active fragment of a prostate cancer associated polypeptide; (d) a nucleotide sequence in SEQ ID NO:X or the cDNA sequence of Clone ID NO:Z, which encodes an antigenic fragment of a prostate cancer associated polypeptide; (e) a nucleotide sequence encoding a prostate cancer associated polypeptide having the complete amino acid sequence of SEQ ID NO:Y or the complete amino acid sequence encoded by the cDNA in Clone ID NO:Z; (f) a nucleotide sequence encoding a mature prostate cancer associated polypeptide of the amino acid sequence of SEQ ID NO:Y or the amino acid sequence encoded by the cDNA in Clone ID NO:Z; (g) a nucleotide sequence encoding a biologically active fragment of a prostate cancer associated polypeptide having the complete amino acid sequence of SEQ ID NO:Y or the complete amino acid sequence encoded by the cDNA in Clone ID NO:Z; (h) a nucleotide sequence encoding an antigenic fragment of a prostate cancer associated polypeptide having the complete amino acid sequence of SEQ ID NO:Y or the complete amino acid sequence encoded by the cDNA in Clone ID NO:Z; and (i) a nucleotide sequence complementary to any of the nucleotide sequences in (a), (b), (c), (d); (e), (f), (g), or (h), above.

[0089] The present invention is also directed to nucleic acid molecules which comprise, or alternatively consist of, a nucleotide sequence which is at least 80%, 85%, 90%, 95%, 96%, 97%, 98%, 99% or 100%, identical to, for example, any of the nucleotide sequences in (a), (b), (c), (d), (e), (f), (g), (h), or (i) above, the nucleotide coding sequence in SEQ ID NO:X or the complementary strand thereto, the nucleotide coding sequence of the cDNA contained in Clone ID NO:Z or the complementary strand thereto, a nucleotide sequence encoding the polypeptide of SEQ ID NO:Y, a nucleotide sequence encoding a polypeptide sequence encoded by the nucleotide sequence in SEQ ID NO:X, a polypeptide sequence encoded by the complement of the polynucleotide sequence in SEQ ID NO:X, a nucleotide sequence encoding the polypeptide encoded by the cDNA contained in Clone ID NO:Z, the nucleotide coding sequence in SEQ ID NO:X as defined in columns 8 and 9 of Table 2 or the complementary strand thereto, a nucleotide sequence encoding the polypeptide encoded by the nucleotide sequence in SEQ ID NO:X as defined in columns 8 and 9 of Table 2 or the complementary strand thereto, the nucleotide coding sequence in SEQ ID NO:B as defined in column 6 of Table 1B or the complementary strand thereto, a nucleotide sequence encoding the polypeptide encoded by the nucleotide sequence in SEQ ID NO:B as defined in column 6 of Table 1B or the complementary strand thereto, the nucleotide sequence in SEQ ID NO:X encoding the polypeptide sequence as defined in column 6 of Table 1A or the complementary strand thereto, nucleotide sequences encoding a polypeptide as defined in column 6 of Table 1A or the complementary strand thereto, and/or polynucleotide fragments of any of these nucleic acid molecules (e.g., those fragments described herein). Polynucleotides which hybridize to the complement of these nucleic acid molecules under stringent hybridization conditions or alternatively, under lower stringency conditions, are also encompassed by the invention, as are polypeptides encoded by these polynucleotides and nucleic acids.

[0090] In a preferred embodiment, the invention encompasses nucleic acid molecules which comprise, or alternatively, consist of a polynucleotide which hybridizes under stringent hybridization conditions, or alternatively, under lower stringency conditions, to a polynucleotide in (a), (b), (c), (d), (e), (f), (g), (h), or (i) above, as are polypeptides encoded by these polynucleotides. In another preferred embodiment, polynucleotides which hybridize to the complement of these nucleic acid molecules under stringent hybridization conditions or alternatively, under lower stringency conditions, are also encompassed by the invention, as are polypeptides encoded by these polynucleotides.

[0091] In another embodiment, the invention provides a purified protein comprising, or alternatively consisting of, a polypeptide having an amino acid sequence selected from the group consisting of: (a) the complete amino acid sequence of SEQ ID NO:Y or the complete amino acid sequence encoded by the cDNA in Clone ID NO:Z; (b) the amino acid sequence of a mature prostate cancer associated polypeptide having the amino acid sequence of SEQ ID NO:Y or the amino acid sequence encoded by the cDNA in Clone ID NO:Z; (c) the amino acid sequence of a biologically active fragment of a prostate cancer associated polypeptide having the complete amino acid sequence of SEQ ID NO:Y or the complete amino acid sequence encoded by the cDNA in Clone ID NO:Z; and (d) the amino acid sequence of an antigenic fragment of a prostate cancer associated polypeptide having the complete amino acid sequence of SEQ ID NO:Y or the complete amino acid sequence encoded by the cDNA in Clone ID NO:Z.

[0092] The present invention is also directed to proteins which comprise, or alternatively consist of, an amino acid sequence which is at least 80%, 85%, 90%, 95%, 96%, 97%, 98%, 99% or 100%, identical to, for example, any of the amino acid sequences in (a), (b), (c), or (d), above, the amino acid sequence shown in SEQ ID NO:Y, the amino acid sequence encoded by the cDNA contained in Clone ID NO:Z, the amino acid sequence of the polypeptide encoded by the nucleotide sequence in SEQ ID NO:X as defined in columns 8 and 9 of Table 2, the amino acid sequence of the polypeptide encoded by the nucleotide sequence in SEQ ID NO:B as defined in column 6 of Table 1B, the amino acid sequence as defined in column 6 of Table 1A, an amino acid sequence encoded by the nucleotide sequence in SEQ ID NO:X, and an amino acid sequence encoded by the complement of the polynucleotide sequence in SEQ ID NO:X. Fragments of these polypeptides are also provided (e.g., those fragments described herein). Further proteins encoded by polynucleotides which hybridize to the complement of the nucleic acid molecules encoding these amino acid sequences under stringent hybridization conditions or alternatively, under lower stringency conditions, are also encompassed by the invention, as are the polynucleotides encoding these proteins.

[0093] By a nucleic acid having a nucleotide sequence at least, for example, 95% “identical” to a reference nucleotide sequence of the present invention, it is intended that the nucleotide sequence of the nucleic acid is identical to the reference sequence except that the nucleotide sequence may include up to five point mutations per each 100 nucleotides of the reference nucleotide sequence encoding the polypeptide. In other words, to obtain a nucleic acid having a nucleotide sequence at least 95% identical to a reference nucleotide sequence, up to 5% of the nucleotides in the reference sequence may be deleted or substituted with another nucleotide, or a number of nucleotides up to 5% of the total nucleotides in the reference sequence may be inserted into the reference sequence. The query sequence may be an entire sequence referred to in Table 1A or 2 as the ORF (open reading frame), or any fragment specified, as described herein.

[0094] As a practical matter, whether any particular nucleic acid molecule or polypeptide is at least 80%, 85%, 90%, 95%, 96%, 97%, 98% or 99% identical to a nucleotide sequence of the present invention can be determined conventionally using known computer programs. A preferred method for determining the best overall match between a query sequence (a sequence of the present invention) and a subject sequence, also referred to as a global sequence alignment, can be determined using the FASTDB computer program based on the algorithm of Brutlag et al. (Comp. App. Biosci. 6:237-245 (1990)). In a sequence alignment the query and subject sequences are both DNA sequences. An RNA sequence can be compared by converting U's to T's. The result of said global sequence alignment is expressed as percent identity. Preferred parameters used in a FASTDB alignment of DNA sequences to calculate percent identity are: Matrix=Unitary, k-tuple=4, Mismatch Penalty=1, Joining Penalty=30, Randomization Group Length=0, Cutoff Score=l, Gap Penalty=5, Gap Size Penalty 0.05, Window Size=500 or the length of the subject nucleotide sequence, whichever is shorter.

[0095] If the subject sequence is shorter than the query sequence because of 5′ or 3′ deletions, not because of internal deletions, a manual correction must be made to the results. This is because the FASTDB program does not account for 5′ and 3′ truncations of the subject sequence when calculating percent identity. For subject sequences truncated at the 5′ or 3′ ends, relative to the query sequence, the percent identity is corrected by calculating the number of bases of the query sequence that are 5′ and 3′ of the subject sequence, which are not matched/aligned, as a percent of the total bases of the query sequence. Whether a nucleotide is matched/aligned is determined by results of the FASTDB sequence alignment. This percentage is then subtracted from the percent identity, calculated by the above FASTDB program using the specified parameters, to arrive at a final percent identity score. This corrected score is what is used for the purposes of the present invention. Only bases outside the 5′ and 3′ bases of the subject sequence, as displayed by the FASTDB alignment, which are not matched/aligned with the query sequence, are calculated for the purposes of manually adjusting the percent identity score.

[0096] For example, a 90 base subject sequence is aligned to a 100 base query sequence to determine percent identity. The deletions occur at the 5′ end of the subject sequence and therefore, the FASTDB alignment does not show a matched/alignment of the first 10 bases at 5′ end. The 10 unpaired bases represent 10% of the sequence (number of bases at the 5′ and 3′ ends not matched/total number of bases in the query sequence) so 10% is subtracted from the percent identity score calculated by the FASTDB program. If the remaining 90 bases were perfectly matched the final percent identity would be 90%. In another example, a 90 base subject sequence is compared with a 100 base query sequence. This time the deletions are internal deletions so that there are no bases on the 5′ or 3′ of the subject sequence which are not matched/aligned with the query. In this case the percent identity calculated by FASTDB is not manually corrected. Once again, only bases 5′ and 3′ of the subject sequence which are not matched/aligned with the query sequence are manually corrected for. No other manual corrections are to be made for the purposes of the present invention.

[0097] By a polypeptide having an amino acid sequence at least, for example, 95% “identical” to a query amino acid sequence of the present invention, it is intended that the amino acid sequence of the subject polypeptide is identical to the query sequence except that the subject polypeptide sequence may include up to five amino acid alterations per each 100 amino acids of the query amino acid sequence. In other words, to obtain a polypeptide having an amino acid sequence at least 95% identical to a query amino acid sequence, up to 5% of the amino acid residues in the subject sequence may be inserted, deleted, (indels) or substituted with another amino acid. These alterations of the reference sequence may occur at the amino or carboxy terminal positions of the reference amino acid sequence or anywhere between those terminal positions, interspersed either individually among residues in the reference sequence or in one or more contiguous groups within the reference sequence.

[0098] As a practical matter, whether any particular polypeptide is at least 80%, 85%, 90%, 95%, 96%, 97%, 98% or 99% identical to, for instance, the amino acid sequence of a polypeptide referred to in Table 1A (e.g., an amino acid sequence identified in columns 5 or 6) or Table 2 (e.g., the amino acid sequence of the polypeptide encoded by the polynucleotide sequence defined in columns 8 and 9 of Table 2) or a fragment thereof, the amino acid sequence of the polypeptide encoded by the polynucleotide sequence in SEQ ID NO:B as defined in column 6 of Table 1B or a fragment thereof, the amino acid sequence of the polypeptide encoded by the nucleotide sequence in SEQ ID NO:X or a fragment thereof, or an amino acid sequence of the polypeptide encoded by cDNA contained in Clone ID NO:Z, or a fragment thereof, can be determined conventionally using known computer programs. A preferred method for determining the best overall match between a query sequence (a sequence of the present invention) and a subject sequence, also referred to as a global sequence alignment, can be determined using the FASTDB computer program based on the algorithm of Brutlag et al. (Comp. App. Biosci.6:237-245 (1990)). In a sequence alignment the query and subject sequences are either both nucleotide sequences or both amino acid sequences. The result of said global sequence alignment is expressed as percent identity. Preferred parameters used in a FASTDB amino acid alignment are: Matrix=PAM 0, k-tuple=2, Mismatch Penalty=l, Joining Penalty=20, Randomization Group Length=0, Cutoff Score=1, Window Size=sequence length, Gap Penalty=5, Gap Size Penalty=0.05, Window Size=500 or the length of the subject amino acid sequence, whichever is shorter.

[0099] If the subject sequence is shorter than the query sequence due to N- or C-terminal deletions, not because of internal deletions, a manual correction must be made to the results. This is because the FASTDB program does not account for N- and C-terminal truncations of the subject sequence when calculating global percent identity. For subject sequences truncated at the N- and C-termini, relative to the query sequence, the percent identity is corrected by calculating the number of residues of the query sequence that are N- and C-terminal of the subject sequence, which are not matched/aligned with a corresponding subject residue, as a percent of the total bases of the query sequence. Whether a residue is matched/aligned is determined by results of the FASTDB sequence alignment. This percentage is then subtracted from the percent identity, calculated by the above FASTDB program using the specified parameters, to arrive at a final percent identity score. This final percent identity score is what is used for the purposes of the present invention. Only residues to the N- and C-termini of the subject sequence, which are not matched/aligned with the query sequence, are considered for the purposes of manually adjusting the percent identity score. That is, only query residue positions outside the farthest N- and C- terminal residues of the subject sequence.

[0100] For example, a 90 amino acid residue subject sequence is aligned with a 100 residue query sequence to determine percent identity. The deletion occurs at the N-terminus of the subject sequence and therefore, the FASTDB alignment does not show a matching/alignment of the first 10 residues at the N-terminus. The 10 unpaired residues represent 10% of the sequence (number of residues at the N- and C-termini not matched/total number of residues in the query sequence) so 10% is subtracted from the percent identity score calculated by the FASTDB program. If the remaining 90 residues were perfectly matched the final percent identity would be 90%. In another example, a 90 residue subject sequence is compared with a 100 residue query sequence. This time the deletions are internal deletions so there are no residues at the N- or C-termini of the subject sequence which are not matched/aligned with the query. In this case the percent identity calculated by FASTDB is not manually corrected. Once again, only residue positions outside the N- and C-terminal ends of the subject sequence, as displayed in the FASTDB alignment, which are not matched/aligned with the query sequence are manually corrected for. No other manual corrections are to be made for the purposes of the present invention.

[0101] The polynucleotide variants of the invention may contain alterations in the coding regions, non-coding regions, or both. Especially preferred are polynucleotide variants containing alterations, which produce silent substitutions, additions, or deletions, but do not alter the properties or activities of the encoded polypeptide. Nucleotide variants produced by silent substitutions due to the degeneracy of the genetic code are preferred. Moreover, polypeptide variants in which less than 50, less than 40, less than 30, less than 20, less than 10, or 5-50, 5-25, 5-10, 1-5, or 1-2 amino acids are substituted, deleted, or added in any combination are also preferred. Polynucleotide variants can be produced for a variety of reasons, e.g., to optimize codon expression for a particular host (change codons in the human mRNA to those preferred by a bacterial host such as E. coli).

[0102] Naturally occurring variants are called “allelic variants,” and refer to one of several alternate forms of a gene occupying a given locus on a chromosome of an organism. (Genes II, Lewin, B., ed., John Wiley & Sons, New York (1985).) These allelic variants can vary at either the polynucleotide and/or polypeptide level and are included in the present invention. Alternatively, non-naturally occurring variants may be produced by mutagenesis techniques or by direct synthesis.

[0103] Using known methods of protein engineering and recombinant DNA technology, variants may be generated to improve or alter the characteristics of the polypeptides of the present invention. For instance, one or more amino acids can be deleted from the N-terminus or C-terminus of the polypeptides of the present invention without substantial loss of biological function. As an example, the authors of Ron et al., J. Biol. Chem. 268: 2984-2988 (1993), reported variant KGF proteins having heparin binding activity even after deleting 3, 8, or 27 amino-terminal amino acid residues. Similarly, Interferon gamma exhibited up to ten times higher activity after deleting 8-10 amino acid residues from the carboxy terminus of this protein. (Dobeli et al., J. Biotechnology 7:199-216 (1988))

[0104] Moreover, ample evidence demonstrates that variants often retain a biological activity similar to that of the naturally occurring protein. For example, Gayle and coworkers (J. Biol. Chem. 268:22105-22111 (1993)) conducted extensive mutational analysis of human cytokine IL-1a. They used random mutagenesis to generate over 3,500 individual IL-1a mutants that averaged 2.5 amino acid changes per variant over the entire length of the molecule. Multiple mutations were examined at every possible amino acid position. The investigators found that “[m]ost of the molecule could be altered with little effect on either [binding or biological activity].”In fact, only 23 unique amino acid sequences, out of more than 3,500 nucleotide sequences examined, produced a protein that significantly differed in activity from wild-type.

[0105] Furthermore, even if deleting one or more amino acids from the N-terminus or C-terminus of a polypeptide results in modification or loss of one or more biological functions, other biological activities may still be retained. For example, the ability of a deletion variant to induce and/or to bind antibodies which recognize the secreted form will likely be retained when less than the majority of the residues of the secreted form are removed from the N-terminus or C-terminus. Whether a particular polypeptide lacking N- or C-terminal residues of a protein retains such immunogenic activities can readily be determined by routine methods described herein and otherwise known in the art.

[0106] Thus, the invention further includes polypeptide variants which show a functional activity (e.g., biological activity) of the polypeptides-of the invention. Such variants include deletions, insertions, inversions, repeats, and substitutions selected according to general rules known in the art so as have little effect on activity.

[0107] The present application is directed to nucleic acid molecules at least 80%, 85%, 90%, 95%, 96%, 97%, 98%, 99% or 100% identical to the nucleic acid sequences disclosed herein, (e.g., encoding a polypeptide having the amino acid sequence of an N and/or C terminal deletion), irrespective of whether they encode a polypeptide having functional activity. This is because even where a particular nucleic acid molecule does not encode a polypeptide having functional activity, one of skill in the art would still know how to use the nucleic acid molecule, for instance, as a hybridization probe or a polymerase chain reaction (PCR) primer. Uses of the nucleic acid molecules of the present invention that do not encode a polypeptide having functional activity include, inter alia, (1) isolating a gene or allelic or splice variants thereof in a cDNA library; (2) in situ hybridization (e.g., “FISH”) to metaphase chromosomal spreads to provide precise chromosomal location of the gene, as described in Verma et al., Human Chromosomes: A Manual of Basic Techniques, Pergamon Press, New York (1988); (3) Northern Blot analysis for detecting mRNA expression in specific tissues (e.g., normal prostate or diseased prostate tissues); and (4) in situ hybridization (e.g., histochemistry) for detecting mRNA expression in specific tissues (e.g., normal prostate or diseased prostate tissues).

[0108] Preferred, however, are nucleic acid molecules having sequences at least 80%, 85%, 90%, 95%, 96%, 97%, 98%, 99% or 100% identical to the nucleic acid sequences disclosed herein, which do, in fact, encode a polypeptide having functional activity. By a polypeptide having “functional activity” is meant, a polypeptide capable of displaying one or more known functional activities associated with a full-length (complete) protein of the invention. Such functional activities include, but are not limited to, biological activity, antigenicity [ability to bind (or compete with a polypeptide of the invention for binding) to an anti-polypeptide of the invention antibody], immunogenicity (ability to generate antibody which binds to a specific polypeptide of the invention), ability to form multimers with polypeptides of the invention, and ability to bind to a receptor or ligand for a polypeptide of the invention.

[0109] The functional activity of the polypeptides, and fragments, variants and derivatives of the invention, can be assayed by various methods.

[0110] For example, in one embodiment where one is assaying for the ability to bind or compete with full-length polypeptide of the present invention for binding to an anti-polypeptide of the invention antibody, various immunoassays known in the art can be used, including but not limited to, competitive and non-competitive assay systems using techniques such as radioimmunoassays, ELISA (enzyme linked immunosorbent assay), “sandwich” immunoassays, immunoradiometric assays, gel diffusion precipitation reactions, immunodiffusion assays, in situ immunoassays (using colloidal gold, enzyme or radioisotope labels, for example), western blots, precipitation reactions, agglutination assays (e.g., gel agglutination assays, hemagglutination assays), complement fixation assays, immunofluorescence assays, protein A assays, and immunoelectrophoresis assays, etc. In one embodiment, antibody binding is detected by detecting a label on the primary antibody. In another embodiment, the primary antibody is detected by detecting binding of a secondary antibody or reagent to the primary antibody. In a further embodiment, the secondary antibody is labeled. Many means are known in the art for detecting binding in an immunoassay and are within the scope of the present invention.

[0111] In another embodiment, where a ligand is identified, or the ability of a polypeptide fragment, variant or derivative of the invention to multimerize is being evaluated, binding can be assayed, e.g., by means well-known in the art, such as, for example, reducing and non-reducing gel chromatography, protein affinity chromatography, and affinity blotting. See generally, Phizicky et al., Microbiol. Rev. 59:94-123 (1995). In another embodiment, the ability of physiological correlates of a polypeptide of the present invention to bind to a substrate(s) of the polypeptide of the invention can be routinely assayed using techniques known in the art.

[0112] In addition, assays described herein (see Examples) and otherwise known in the art may routinely be applied to measure the ability of polypeptides of the present invention and fragments, variants and derivatives thereof to elicit polypeptide related biological activity (either in vitro or in vivo). Other methods will be known to the skilled artisan and are within the scope of the invention.

[0113] Of course, due to the degeneracy of the genetic code, one of ordinary skill in the art will immediately recognize that a large number of the nucleic acid molecules having a sequence at least 80%, 85%, 90%, 95%, 96%, 97%, 98%, 99%, or 100% identical to, for example, the nucleic acid sequence of the cDNA contained in Clone ID NO:Z, a nucleic acid sequence referred to in Table 1A (e.g., SEQ ID NO:X), a nucleic acid sequence disclosed in Table 2 (e.g., the nucleic acid sequence delineated in columns 8 and 9) or fragments thereof, will encode polypeptides “having functional activity.” In fact, since degenerate variants of any of these nucleotide sequences all encode the same polypeptide, in many instances, this will be clear to the skilled artisan even without performing the above described comparison assay. It will be further recognized in the art that, for such nucleic acid molecules that are not degenerate variants, a reasonable number will also encode a polypeptide having functional activity. This is because the skilled artisan is fully aware of amino acid substitutions that are either less likely or not likely to significantly effect protein function (e.g., replacing one aliphatic amino acid with a second aliphatic amino acid), as further described below.

[0114] For example, guidance concerning how to make phenotypically silent amino acid substitutions is provided in Bowie et al., “Deciphering the Message in Protein Sequences Tolerance to Amino Acid Substitutions,” Science 247:1306-1310 (1990), wherein the authors indicate that there are two main strategies for studying the tolerance of an amino acid sequence to change.

[0115] The first strategy exploits the tolerance of amino acid substitutions by natural selection during the process of evolution. By comparing amino acid sequences in different species, conserved amino acids can be identified. These conserved amino acids are likely important for protein function. In contrast, the amino acid positions where substitutions have been tolerated by natural selection indicates that these positions are not critical for protein function. Thus, positions tolerating amino acid substitution could be modified while still maintaining biological activity of the protein.

[0116] The second strategy uses genetic engineering to introduce amino acid changes at specific positions of a cloned gene to identify regions critical for protein function. For example, site directed mutagenesis or alanine-scanning, mutagenesis (introduction of single alanine mutations at every residue in the molecule) can be used. See Cunningham et al., Science 244:1081-1085 (1989). The resulting mutant molecules can then be tested for biological activity.

[0117] As the authors state, these two strategies have revealed that proteins are surprisingly tolerant of amino acid substitutions. The authors further indicate which amino acid changes are likely to be permissive at certain amino acid positions in the protein. For example, most buried (within the tertiary structure of the protein) amino acid residues require nonpolar side chains, whereas few features of surface side chains are generally conserved. Moreover, tolerated conservative amino acid substitutions involve replacement of the aliphatic or hydrophobic amino acids Ala, Val, Leu and Ile; replacement of the hydroxyl residues Ser and Thr; replacement of the acidic residues Asp and Glu; replacement of the amide residues Asn and Gln, replacement of the basic residues Lys, Arg, and His; replacement of the aromatic residues Phe, Tyr, and Trp, and replacement of the small-sized amino acids Ala, Ser, Thr, Met, and Gly. Besides conservative amino acid substitutions, variants of the present invention include (i) substitutions with one or more of the non-conserved amino acid residues, where the substituted amino acid residues may or may not be one encoded by the genetic code, or (ii) substitutions with one or more of the amino acid residues having a substituent group, or (iii) fusion of the mature polypeptide with another compound, such as a compound to increase the stability and/or solubility of the polypeptide (for example, polyethylene glycol), or (iv) fusion of the polypeptide with additional amino acids, such as, for example, an IgG Fc fusion region peptide, serum albumin (preferably human serum albumin) or a fragment or variant thereof, or leader or secretory sequence, or a sequence facilitating purification. Such variant polypeptides are deemed to be within the scope of those skilled in the art from the teachings herein.

[0118] For example, polypeptide variants containing amino acid substitutions of charged amino acids with other charged or neutral amino acids may produce proteins with improved characteristics, such as less aggregation. Aggregation of pharmaceutical formulations both reduces activity and increases clearance due to the aggregate's immunogenic activity. See Pinckard et al., Clin. Exp. Immunol. 2:331-340 (1967); Robbins et al., Diabetes 36: 838-845 (1987); Cleland et al., Crit. Rev. Therapeutic Drug Carrier Systems 10:307-377 (1993).

[0119] A further embodiment of the invention relates to polypeptides which comprise the amino acid sequence of a polypeptide having an amino acid sequence which contains at least one amino acid substitution, but not more than 50 amino acid substitutions, even more preferably, not more than 40 amino acid substitutions, still more preferably, not more than 30 amino acid substitutions, and still even more preferably, not more than 20 amino acid substitutions from a polypeptide sequence disclosed herein. Of course it is highly preferable for a polypeptide to have an amino acid sequence which comprises the amino acid sequence of a polypeptide of SEQ ID NO:Y, an amino acid sequence encoded by SEQ ID NO:X, an amino acid sequence encoded by the portion of SEQ ID NO:X as defined in columns 8 and 9 of Table 2, an amino acid sequence encoded by the complement of SEQ ID NO:X, and/or the amino acid sequence encoded by cDNA contained in Clone ID NO:Z which contains, in order of ever-increasing preference, at least one, but not more than 10, 9, 8, 7, 6, 5, 4, 3, 2 or 1 amino acid substitutions.

[0120] In specific embodiments, the polypeptides of the invention comprise, or alternatively, consist of, fragments or variants of a reference amino acid sequence selected from: (a) the amino acid sequence of SEQ ID NO:Y or fragments thereof (e.g., the mature form and/or other fragments described herein); (b) the amino acid sequence encoded by SEQ ID NO:X or fragments thereof; (c) the amino acid sequence encoded by the complement of SEQ ID NO:X or fragments thereof; (d) the amino acid sequence encoded by the portion of SEQ ID NO:X as defined in columns 8 and 9 of Table 2 or fragments thereof; and (e) the amino acid sequence encoded by cDNA contained in Clone ID NO:Z or fragments thereof; wherein the fragments or variants have 1-5, 5-10, 5-25, 5-50, 10-50 or 50-150, amino acid residue additions, substitutions, and/or deletions when compared to the reference amino acid sequence. In preferred embodiments, the amino acid substitutions are conservative. Polynucleotides encoding these polypeptides are also encompassed by the invention.

### Polynucleotide and Polypeptide Fragments

[0121] The present invention is also directed to polynucleotide fragments of the polynucleotides (nucleic acids) of the invention. In the present invention, a “polynucleotide fragment” refers to a polynucleotide having a nucleic acid sequence which, for example: is a portion of the cDNA contained in Clone ID NO:Z or the complementary strand thereto; is a portion of the polynucleotide sequence encoding the polypeptide encoded by the cDNA contained in Clone ID NO:Z or the complementary strand thereto; is a portion of a polynucleotide sequence encoding the amino acid sequence encoded by the region of SEQ ID NO:X as defined in columns 8 and 9 of Table 2 or the complementary strand thereto; is a portion of the polynucleotide sequence of SEQ ID NO:X as defined in columns 8 and 9 of Table 2 or the complementary strand thereto; is a portion of the polynucleotide sequence in SEQ ID NO:X or the complementary strand thereto; is a polynucleotide sequence encoding a portion of the polypeptide of SEQ ID NO:Y; is a polynucleotide sequence encoding a portion of a polypeptide encoded by SEQ ID NO:X; is a polynucleotide sequence encoding a portion of a polypeptide encoded by the complement of the polynucleotide sequence in SEQ ID NO:X; is a portion of a polynucleotide sequence encoding the amino acid sequence encoded by the region of SEQ ID NO:B as defined in column 6 of Table 1B or the complementary strand thereto; or is a portion of the polynucleotide sequence of SEQ ID NO:B as defined in column 6 of Table 1B or the complementary strand thereto.

[0122] The polynucleotide fragments of the invention are preferably at least about 15 nt, and more preferably at least about 20 nt, still more preferably at least about 30 nt, and even more preferably, at least about 40 nt, at least about 50 nt, at least about 75 nt, or at least about 150 nt in length. A fragment “at least 20 nt in length,” for example, is intended to include 20 or more contiguous bases from the cDNA sequence contained in Clone ID NO:Z, or the nucleotide sequence shown in SEQ ID NO:X or the complementary stand thereto. In this context “about” includes the particularly recited value or a value larger or smaller by several (5, 4, 3, 2, or 1) nucleotides, at either terminus or at both termini. These nucleotide fragments have uses that include, but are not limited to, as diagnostic probes and primers as discussed herein. Of course, larger fragments (e.g., at least 160, 170, 180, 190, 200, 250, 500, 600, 1000, or 2000 nucleotides in length) are also encompassed by the invention.

[0123] Moreover, representative examples of polynucleotide fragments of the invention, comprise, or alternatively consist of, a sequence from about nucleotide number 1-50, 51-100, 101-150, 151-200, 201-250, 251-300, 301-350, 351-400, 401-450, 451-500, 501-550, 551-600, 651-700, 701-750, 751-800, 800-850, 851-900, 901-950, 951-1000, 1001-1050, 1051-1100, 1101-1150, 1151-1200, 1201-1250, 1251-1300, 1301-1350, 1351-1400, 1401-1450, 1451-1500, 1501-1550, 1551-1600, 1601-1650, 1651-1700, 1701-1750, 1751-1800, 1801-1850, 1851-1900, 1901-1950, 1951-2000, 2001-2050, 2051-2100, 2101-2150, 2151-2200, 2201-2250, 2251-2300, 2301-2350, 2351-2400, 2401-2450, 2451-2500, 2501-2550, 2551-2600, 2601-2650, 2651-2700, 2701-2750, 2751-2800, 2801-2850, 2851-2900, 2901-2950, 2951-3000, 3001-3050, 3051-3100, 3101-3150, 3151-3200, 3201-3250, 3251-3300, 3301-3350, 3351-3400, 3401-3450, 3451-3500, 3501-3550, 3551-3600, 3601-3650, 3651-3700, 3701-3750, 3751-3800, 3801-3850, 3851-3900, 3901-3950, 3951-4000, 4001-4050, 4051-4100, 4101-4150, 4151-4200, 4201-4250, 4251-4300, 4301-4350, 4351-4400, 4401-4450, 4451-4500, 4501-4550, 4551-4600, 4601-4650, 4651-4700, 4701-4750, 4751-4800, 4801-4850, 4851-4900, 4901-4950, 4951-5000, 5001-5050, 5051-5100, 5101-5150, 5151-5200, 5201-5250, 5251-5300, 5301-5350, 5351-5400, 5401-5450, 5451-5500, 5501-5550, 5551-5600, 5601-5650, 5651-5700, 5701-5750, 5751-5800, 5801-5850, 5851-5900, 5901-5950, 5951-6000, 6001-6050, 6051-6100, 6101-6150, 6151-6200, 6201-6250, 6251-6300, 6301-6350, 6351-6400, 6401-6450, 6451-6500, 6501-6550, 6551-6600, 6601-6650, 6651-6700, 6701-6750, 6751-6800, 6801-6850, 6851-6900, 6901-6950, 6951-7000, 7001-7050, 7051-7100, 7101-7150, 7151-7200, 7201-7250, 7251-7300 or 7301 to the end of SEQ ID NO:X, or the complementary strand thereto. In this context “about” includes the particularly recited range or a range larger or smaller by several (5, 4, 3, 2, or 1) nucleotides, at either terminus or at both termini. Preferably, these fragments encode a polypeptide, which has a functional activity (e.g., biological activity). More preferably, these polynucleotides can be used as probes or primers as discussed herein. Polynucleotides which hybridize to one or more of these polynucleotides under stringent hybridization conditions or alternatively, under lower stringency conditions are also encompassed by the invention, as are polypeptides encoded by these polynucleotides.

[0124] Further representative examples of polynucleotide fragments of the invention, comprise, or alternatively consist of, a sequence from about nucleotide number 1-50, 51-100, 101-150, 151-200, 201-250, 251-300, 301-350, 351-400, 401-450, 451-500, 501-550, 551-600, 651-700, 701-750, 751-800, 800-850, 851-900, 901-950, 951-1000, 1001-1050, 1051-1100, 1101-1150, 1151-1200, 1201-1250, 1251-1300, 1301-1350, 1351-1400, 1401-1450, 1451-1500, 1501-1550, 1551-1600, 1601-1650, 1651-1700, 1701-1750, 1751-1800, 1801-1850, 1851-1900, 1901-1950, 1951-2000, 2001-2050, 2051-2100, 2101-2150, 2151-2200, 2201-2250, 2251-2300, 2301-2350, 2351-2400, 2401-2450, 2451-2500, 2501-2550, 2551-2600, 2601-2650, 2651-2700, 2701-2750, 2751-2800, 2801-2850, 2851-2900, 2901-2950, 2951-3000, 3001-3050, 3051-3100, 3101-3150, 3151-3200, 3201-3250, 3251-3300, 3301-3350, 3351-3400, 3401-3450, 3451-3500, 3501-3550, 3551-3600, 3601-3650, 3651-3700, 3701-3750, 3751-3800, 3801-3850, 3851-3900, 3901-3950, 3951-4000, 4001-4050, 4051-4100, 4101-4150, 4151-4200, 4201-4250, 4251-4300, 4301-4350, 4351-4400, 4401-4450, 4451-4500, 4501-4550, 4551-4600, 4601-4650, 4651-4700, 4701-4750, 4751-4800, 4801-4850, 4851-4900, 4901-4950, 4951-5000, 5001-5050, 5051-5100, 5101-5150, 5151-5200, 5201-5250, 5251-5300, 5301-5350, 5351-5400, 5401-5450, 5451-5500, 5501-5550, 5551-5600, 5601-5650, 5651-5700, 5701-5750, 5751-5800, 5801-5850, 5851-5900, 5901-5950, 5951-6000, 6001-6050, 6051-6100, 6101-6150, 6151-6200, 6201-6250, 6251-6300, 6301-6350, 6351-6400, 6401-6450, 6451-6500, 6501-6550, 6551-6600, 6601-6650, 6651-6700, 6701-6750, 6751-6800, 6801-6850, 6851-6900, 6901-6950, 6951-7000, 7001-7050, 7051-7100, 7101-7150, 7151-7200, 7201-7250, 7251-7300 or 7301 to the end of the cDNA sequence contained in Clone ID NO:Z, or the complementary strand thereto. In this-context “about” includes the particularly recited range or a range larger or smaller by several (5, 4, 3, 2, or 1) nucleotides, at either terminus or at both termini. Preferably, these fragments encode a polypeptide, which has a functional activity (e.g., biological activity). More preferably, these polynucleotides can be used as probes or primers as discussed herein. Polynucleotides which hybridize to one or more of these polynucleotides under stringent hybridization conditions or alternatively, under lower stringency conditions are also encompassed by the invention, as are polypeptides encoded by these polynucleotides.

[0125] Moreover, representative examples of polynucleotide fragments of the invention comprise, or alternatively consist of, a nucleic acid sequence comprising one, two, three, four, five, six, seven, eight, nine, ten, or more of the above described polynucleotide fragments of the invention in combination with a polynucleotide sequence delineated in Table 1B column 6. Additional, representative examples of polynucleotide fragments of the invention comprise, or alternatively consist of, a nucleic acid sequence comprising one, two, three, four, five, six, seven, eight, nine, ten, or more of the above described polynucleotide fragments of the invention in combination with a polynucleotide sequence that is the complementary strand of a sequence delineated in column 6 of Table 1B. In further embodiments, the above-described polynucleotide fragments of the invention comprise, or alternatively consist of, sequences delineated in Table 1B, column 6, and have a nucleic acid sequence which is different from that of the BAC fragment having the sequence disclosed in SEQ ID NO:B (see Table 1B, column 5). In additional embodiments, the above-described polynucleotide fragments of the invention comprise, or alternatively consist of, sequences delineated in Table 1B, column 6, and have a nucleic acid sequence which is different from that published for the BAC clone identified as BAC ID NO:A (see Table 1B, column 4). In additional embodiments, the above-described polynucleotides of the invention comprise, or alternatively consist of, sequences delineated Table 1B, column 6, and have a nucleic acid sequence which is different from that contained in the BAC clone identified as BAC ID NO:A (see Table 1B, column 4). Polypeptides encoded by these polynucleotides, other polynucleotides that encode these polypeptides, and antibodies that bind these polypeptides are also encompassed by the invention. Additionally, fragments and variants of the above-described polynucleotides and polypeptides are also encompassed by the invention.

[0126] In additional specific embodiments, polynucleotides of the invention comprise, or alternatively consist of, one, two, three, four, five, six, seven, eight, nine, ten, or more fragments of the sequences delineated in column 6 of Table 1B, and the polynucleotide sequence of SEQ ID NO:X (e.g., as defined in Table 1B, column 2) or fragments or variants thereof. Polypeptides encoded by these polynucleotides, other polynucleotides that encode these polypeptides, and antibodies that bind these polypeptides are also encompassed by the invention.

[0127] In additional specific embodiments, polynucleotides of the invention comprise, or alternatively consist of, one, two, three, four, five, six, seven, eight, nine, ten, or more fragments of the sequences delineated in column 6 of Table 1B which correspond to the same Clone ID NO:Z (see Table 1B, column 1), and the polynucleotide sequence of SEQ ID NO:X (e.g., as defined in Table 1A or 1B) or fragments or variants thereof. Polypeptides encoded by these polynucleotides, other polynucleotides that encode these polypeptides, and antibodies that bind these polypeptides are also encompassed by the invention.

[0128] In further specific embodiments, polynucleotides of the invention comprise, or alternatively consist of, one, two, three, four, five, six, seven, eight, nine, ten, or more fragments of the sequences delineated in the same row of column 6 of Table 1B, and the polynucleotide sequence of SEQ ID NO:X (e.g., as defined in Table 1A or 1B) or fragments or variants thereof. Polypeptides encoded by these polynucleotides, other polynucleotides that encode these polypeptides, and antibodies that bind these polypeptides are also encompassed by the invention.

[0129] In additional specific embodiments, polynucleotides of the invention comprise, or alternatively consist of a polynucleotide sequence in which the 3′ 10 polynucleotides of one of the sequences delineated in column 6 of Table 1B and the 5′ 10 polynucleotides of the sequence of SEQ ID NO:X are directly contiguous. Nucleic acids which hybridize to the complement of these 20 contiguous polynucleotides under stringent hybridization conditions or alternatively, under lower stringency conditions, are also encompassed by the invention. Polypeptides encoded by these polynucleotides and/or nucleic acids, other polynucleotides and/or nucleic acids that encode these polypeptides, and antibodies that bind these polypeptides are also encompassed by the invention. Additionally, fragments and variants of the above-described polynucleotides, nucleic acids, and polypeptides are also encompassed by the invention.

[0130] In additional specific embodiments, polynucleotides of the invention comprise, or alternatively consist of a polynucleotide sequence in which the 3′ 10 polynucleotides of one of the sequences delineated in column 6 of Table 1B and the 5′ 10 polynucleotides of a fragment or variant of the sequence of SEQ ID NO:X (e.g., as described herein) are directly contiguous Nucleic acids which hybridize to the complement of these 20 contiguous polynucleotides under stringent hybridization conditions or alternatively, under lower stringency conditions, are also encompassed by the invention. Polypeptides encoded by these polynucleotides and/or nucleic acids, other polynucleotides and/or nucleic acids encoding these polypeptides, and antibodies that bind these polypeptides are also encompassed by the invention. Additionally, fragments and variants of the above-described polynucleotides, nucleic acids, and polypeptides are also encompassed by the invention.

[0131] In further specific embodiments, polynucleotides of the invention comprise, or alternatively consist of a polynucleotide sequence in which the 3′ 10 polynucleotides of a fragment or variant of the sequence of SEQ ID NO:X and the 5′ 10 polynucleotides of the sequence of one of the sequences delineated in column 6 of Table 1B are directly contiguous. Nucleic acids which hybridize to the complement of these 20 contiguous polynucleotides under stringent hybridization conditions or alternatively, under lower stringency conditions, are also encompassed by the invention. Polypeptides encoded by these polynucleotides and/or nucleic acids, other polynucleotides and/or nucleic acids encoding these polypeptides, and antibodies that bind these polypeptides are also encompassed by the invention. Additionally, fragments and variants of the above-described polynucleotides, nucleic acids, and polypeptides are also encompassed by the invention.

[0132] In specific embodiments, polynucleotides of the invention comprise, or alternatively consist of a polynucleotide sequence in which the 3′ 10 polynucleotides of one of the sequences delineated in column 6 of Table 1B and the 5′ 10 polynucleotides of another sequence in column 6 are directly contiguous. In preferred embodiments, the 3′ 10 polynucleotides of one of the sequences delineated in column 6 of Table 1B is directly contiguous with the 5′ 10 polynucleotides of the next sequential exon delineated in Table 1B, column 6. Nucleic acids which hybridize to the complement of these 20 contiguous polynucleotides under stringent hybridization conditions or alternatively, under lower stringency conditions, are also encompassed by the invention. Polypeptides encoded by these polynucleotides and/or nucleic acids, other polynucleotides and/or nucleic acids encoding these polypeptides, and antibodies that bind these polypeptides are also encompassed by the invention. Additionally, fragments and variants of the above-described polynucleotides, nucleic acids, and polypeptides are also encompassed by the invention.

[0133] In the present invention, a “polypeptide fragment” refers to an amino acid sequence which is a portion of that contained in SEQ ID NO:Y, a portion of an amino acid sequence encoded by the portion of SEQ ID NO:X as defined in columns 8 and 9 of Table 2, a portion of an amino acid sequence encoded by the polynucleotide sequence of SEQ ID NO:X, a portion of an amino acid sequence encoded by the complement of the polynucleotide sequence in SEQ ID NO:X, and/or a portion of an amino acid sequence encoded by the cDNA contained in Clone ID NO:Z. Protein (polypeptide) fragments may be “free-standing,” or comprised within a larger polypeptide of which the fragment forms a part or region, most preferably as a single continuous region. Representative examples of polypeptide fragments of the invention, include, for example, fragments comprising, or alternatively consisting of, from about amino acid number 1-20, 21-40, 41-60, 61-80, 81-100, 102-120, 121-140, 141-160, 161-180, 181-200, 201-220, 221-240, 241-260, 261-280, 281-300, 301-320, 321-340, 341-360, 361-380, 381-400, 401-420, 421-440, 441-460, 461-480, 481-500, 501-520, 521-540, 541-560, 561-580, 581-600, 601-620, 621-640, 641-660, 661-680, 681-700, 701-720, 721-740, 741-760, 761-780, 781-800, 801-820, 821-840, 841-860, 861-880, 881-900, 901-920, 921-940, 941-960, 961-980, 981-1000, 1001-1020, 1021-1040, 1041-1060, 1061-1080, 1081-1100, 1101-1120, 1121-1140, 1141-1160, 1161-1180, 1181-1200, 1201-1220, 1221-1240, 1241-1260, 1261-1280, 1281-1300, 1301-1320, 1321-1340, 1341-1360, 1361-1380, 1381-1400, 1401-1420, 1421-1440, or 1441 to the end of the coding region. In a preferred embodiment, polypeptide fragments of the invention include, for example, fragments comprising, or alternatively consisting of, from about amino acid number 1-20, 21-40, 41-60, 61-80, 81-100, 102-120, 121-140, 141-160, 161-180, 181-200, 201-220, 221-240, 241-260, 261-280, 281-300, 301-320, 321-340, 341-360, 361-380, 381-400,401-420, 421-440, 441-460, 461-480, 481-500, 501-520, 521-540, 541-560, 561-580, 581-600, 601-620, 621-640, 641-660, 661-680, 681-700, 701-720, 721-740, 741-760, 761-780, 781-800, 801-820, 821-840, 841-860, 861-880, 881-900, 901-920, 921-940, 941-960, 961-980, 981-1000, 1001-1020, 1021-1040, 1041-1060, 1061-1080, 1081-1100, 1101-1120, 1121-1140, 1141-1160, 1161-1180, 1181-1200, 1201-1220, 1221-1240, 1241-1260, 1261-1280, 1281-1300, 1301-1320, 1321-1340, 1341-1360, 1361-1380, 1381-1400, 1401-1420, 1421-1440, or 1441 to the end of the coding region of SEQ ID NO:Y. Moreover, polypeptide fragments of the invention may be at least about 10, 15, 20, 25, 30, 35, 40, 45, 50, 55, 60, 65, 70, 75, 80, 85, 90, 100, 110, 120, 130, 140, or 150 amino acids in length. In this context “about” includes the particularly recited ranges or values, or ranges or values larger or smaller by several (5, 4, 3, 2, or 1) amino acids, at either extreme or at both extremes. Polynucleotides encoding these polypeptide fragments are also encompassed by the invention.

[0134] Even if deletion of one or more amino acids from the N-terminus of a protein results in modification of loss of one or more biological functions of the protein, other functional activities (e.g., biological activities, ability to multimerize, ability to bind a ligand) may still be retained. For example, the ability of shortened muteins to induce and/or bind to antibodies which recognize the complete or mature forms of the polypeptides generally will be retained when less than the majority of the residues of the complete or mature polypeptide are removed from the N-terminus. Whether a particular polypeptide lacking N-terminal residues of a complete polypeptide retains such immunologic activities can readily be determined by routine methods described herein and otherwise known in the art. It is not unlikely that a mutein with a large number of deleted N-terminal amino acid residues may retain some biological or immunogenic activities. In fact, peptides composed of as few as six amino acid residues may often evoke an immune response.

[0135] Accordingly, polypeptide fragments include the secreted protein as well as the mature form. Further preferred polypeptide fragments include the secreted protein or the mature form having a continuous series of deleted residues from the amino or the carboxy terminus, or both. For example, any number of amino acids, ranging from 1-60, can be deleted from the amino terminus of either the secreted polypeptide or the mature form. Similarly, any number of amino acids, ranging from 1-30, can be deleted from the carboxy terminus of the secreted protein or mature form. Furthermore, any combination of the above amino and carboxy terminus deletions is preferred. Similarly, polynucleotides encoding these polypeptide fragments are also preferred.

[0136] The present invention further provides polypeptides having one or more residues deleted from the amino terminus of the amino acid sequence of a polypeptide disclosed herein (e.g., a polypeptide of SEQ ID NO:Y, a polypeptide encoded by the polynucleotide sequence contained in SEQ ID NO:X or the complement thereof, a polypeptide encoded by the portion of SEQ ID NO:X as defined in columns 8 and 9 of Table 2, and/or a polypeptide encoded by the cDNA contained in Clone ID NO:Z). In particular, N-terminal deletions may be described by the general formula m−q, where q is a whole integer representing the total number of amino acid residues in a polypeptide of the invention (e.g., the polypeptide disclosed in SEQ ID NO:Y, or the polypeptide encoded by the portion of SEQ ID NO:X as defined in columns 8 and 9 of Table 2), and m is defined as any integer ranging from 2 to q−6. Polynucleotides encoding these polypeptides are also encompassed by the invention.

[0137] The present invention further provides polypeptides having one or more residues from the carboxy terminus of the amino acid sequence of a polypeptide disclosed herein (e.g., a polypeptide of SEQ ID NO:Y, a polypeptide encoded by the polynucleotide sequence contained in SEQ ID NO:X, a polypeptide encoded by the portion of SEQ ID NO:X as defined in columns 8 and 9 of Table 2, and/or a polypeptide encoded by the cDNA contained in Clone ID NO:Z). In particular, C-terminal deletions may be described by the general formula 1−n, where n is any whole integer ranging from 6 to q−1, and where n corresponds to the position of amino acid residue in a polypeptide of the invention. Polynucleotides encoding these polypeptides are also encompassed by the invention.

[0138] In addition, any of the above described N- or C-terminal deletions can be combined to produce a N- and C-terminal deleted polypeptide. The invention also provides polypeptides having one or more amino acids deleted from both the amino and the carboxyl termini, which may be described generally as having residues m-n of a polypeptide encoded by SEQ ID NO:X (e.g., including, but not limited to, the preferred polypeptide disclosed as SEQ ID NO:Y and the polypeptide encoded by the portion of SEQ ID NO:X as defined in columns 8 and 9 of Table 2), the cDNA contained in Clone ID NO:Z, and/or the complement thereof, where n and m are integers as described above. Polynucleotides encoding these polypeptides are also encompassed by the invention.

[0139] Also as mentioned above, even if deletion of one or more amino acids from the C-terminus of a protein results in modification of loss of one or more biological functions of the protein, other functional activities (e.g., biological activities, ability to multimerize, ability to bind a ligand) may still be retained. For example the ability of the shortened mutein to induce and/or bind to antibodies which recognize the complete or mature forms of the polypeptide generally will be retained when less than the majority of the residues of the complete or mature polypeptide are removed from the C-terminus. Whether a particular polypeptide lacking C-terminal residues of a complete polypeptide retains such immunologic activities can readily be determined by routine methods described herein and otherwise known in the art. It is not unlikely that a mutein with a large number of deleted C-terminal amino acid residues may retain some biological or immunogenic activities. In fact, peptides composed of as few as six amino acid residues may often evoke an immune response.

[0140] The present application is also directed to proteins containing polypeptides at least 80%, 85%, 90%, 95%, 96%, 97%, 98% or 99% identical to a polypeptide sequence set forth herein. In preferred embodiments, the application is directed to proteins containing polypeptides at least 80%, 85%, 90%, 95%, 96%, 97%, 98% or 99% identical to polypeptides having the amino acid sequence of the specific N- and C-terminal deletions. Polynucleotides encoding these polypeptides are also encompassed by the invention.

[0141] Any polypeptide sequence encoded by, for example, the polynucleotide sequences set forth as SEQ ID NO:X or the complement thereof, (presented, for example, in Tables 1A and 2), the cDNA contained in Clone ID NO:Z, or the polynucleotide sequence as defined in column 6 of Table 1B, may be analyzed to determine certain preferred regions of the polypeptide. For example, the amino acid sequence of a polypeptide encoded by a polynucleotide sequence of SEQ ID NO:X (e.g., the polypeptide of SEQ ID NO:Y and the polypeptide encoded by the portion of SEQ ID NO:X as defined in columns 8 and 9 of Table 2) or the cDNA contained in Clone ID NO:Z may be analyzed using the default parameters of the DNASTAR computer algorithm (DNASTAR, Inc., 1228 S. Park St., Madison, Wis. 53715 USA; http://www.dnastar.com/).

[0142] Polypeptide regions that may be routinely obtained using the DNASTAR computer algorithm include, but are not limited to, Garnier-Robson alpha-regions, beta-regions, turn-regions, and coil-regions; Chou-Fasman alpha-regions, beta-regions, and turn-regions; Kyte-Doolittle hydrophilic regions and hydrophobic regions; Eisenberg alpha- and beta-amphipathic regions; Karplus-Schulz flexible regions; Emini surface-forming regions; and Jameson-Wolf regions of high antigenic index. Among highly preferred polynucleotides of the invention in this regard are those that encode polypeptides comprising regions that combine several structural features, such as several (e.g., 1, 2, 3 or 4) of the features set out above.

[0143] Additionally, Kyte-Doolittle hydrophilic regions and hydrophobic regions, Emini surface-forming regions, and Jameson-Wolf regions of high antigenic index (i.e., containing four or more contiguous amino acids having an antigenic index of greater than or equal to 1.5, as identified using the default parameters of the Jameson-Wolf program) can routinely be used to determine polypeptide regions that exhibit a high degree of potential for antigenicity. Regions of high antigenicity are determined from data by DNASTAR analysis by choosing values which represent regions of the polypeptide which are likely to be exposed on the surface of the polypeptide in an environment in which antigen recognition may occur in the process of initiation of an immune response.

[0144] Preferred polypeptide fragments of the invention are fragments comprising, or alternatively, consisting of, an amino acid sequence that displays a functional activity (e.g. biological activity) of the polypeptide sequence of which the amino acid sequence is a fragment. By a polypeptide displaying a “functional activity” is meant a polypeptide capable of one or more known functional activities associated with a full-length protein, such as, for example, biological activity, antigenicity, immunogenicity, and/or multimerization, as described herein.

[0145] Other preferred polypeptide fragments are biologically active fragments. Biologically active fragments are those exhibiting activity similar, but not necessarily identical, to an activity of the polypeptide of the present invention. The biological activity of the fragments may include an improved desired activity, or a decreased undesirable activity.

[0146] In preferred embodiments, polypeptides of the invention comprise, or alternatively consist of, one, two, three, four, five or more of the antigenic fragments of the polypeptide of SEQ ID NO:Y, or portions thereof. Polynucleotides encoding these polypeptides are also encompassed by the invention.

[0147] The present invention encompasses polypeptides comprising, or alternatively consisting of, an epitope of: the polypeptide sequence shown in SEQ ID NO:Y; a polypeptide sequence encoded by SEQ ID NO:X or the complementary strand thereto; the polypeptide sequence encoded by the portion of SEQ ID NO:X as defined in columns 8 and 9 of Table 2; the polypeptide sequence encoded by the portion of SEQ ID NO:B as defined in column 6 of Table 1B or the complement thereto; the polypeptide sequence encoded by the cDNA contained in Clone ID NO:Z; or the polypeptide sequence encoded by a polynucleotide that hybridizes to the sequence of SEQ ID NO:X, the complement of the sequence of SEQ ID NO:X, the complement of a portion of SEQ ID NO:X as defined in columns 8 and 9 of Table 2, or the cDNA sequence contained in Clone ID NO:Z under stringent hybridization conditions or alternatively, under lower stringency hybridization as defined supra. The present invention further encompasses polynucleotide sequences encoding an epitope of a polypeptide sequence of the invention (such as, for example, the sequence disclosed in SEQ ID NO:X, or a fragment thereof), polynucleotide sequences of the complementary strand of a polynucleotide sequence encoding an epitope of the invention, and polynucleotide sequences which hybridize to the complementary strand under stringent hybridization conditions or alternatively, under lower stringency hybridization conditions defined supra.

[0148] The term “epitopes,” as used herein, refers to portions of a polypeptide having antigenic or immunogenic activity in an animal, preferably a mammal, and most preferably in a human. In a preferred embodiment, the present invention encompasses a polypeptide comprising an epitope, as well as the polynucleotide encoding this polypeptide. An “immunogenic epitope,” as used herein, is defined as a portion of a protein that elicits an antibody response in an animal, as determined by any method known in the art, for example, by the methods for generating antibodies described infra. (See, for example, Geysen et al., Proc. Natl. Acad. Sci. USA 81:3998-4002 (1983)). The term “antigenic epitope,” as used herein, is defined as a portion of a protein to which an antibody can immunospecifically bind its antigen as determined by any method well known in the art, for example, by the immunoassays described herein. Immunospecific binding excludes non-specific binding but does not necessarily exclude cross- reactivity with other antigens. Antigenic epitopes need not necessarily be immunogenic.

[0149] Fragments, which function as epitopes may be produced by any conventional means. (See, e.g., Houghten, R. A., Proc. Natl. Acad. Sci. USA 82:5131-5135 (1985) further described in U.S. Pat. No. 4,631,211).

[0150] In the present invention, antigenic epitopes preferably contain a sequence of at least 4, at least 5, at least 6, at least 7, more preferably at least 8 , at least 9, at least 10, at least 11, at least 12, at least 13, at least 14, at least 15, at least 20, at least 25, at least 30, at least 40, at least 50, and, most preferably, between about 15 to about 30 amino acids. Preferred polypeptides comprising immunogenic or antigenic epitopes are at least 10, 15, 20, 25, 30, 35, 40, 45, 50, 55, 60, 65, 70, 75, 80, 85, 90, 95, or 100 amino acid residues in length. Additional non-exclusive preferred antigenic epitopes include the antigenic epitopes disclosed herein, as well as portions thereof. Antigenic epitopes are useful, for example, to raise antibodies, including monoclonal antibodies, that specifically bind the epitope. Preferred antigenic epitopes include the antigenic epitopes disclosed herein, as well as any combination of two, three, four, five or more of these antigenic epitopes. Antigenic epitopes can be used as the target molecules in immunoassays. (See, for instance, Wilson et al., Cell 37:767-778 (1984); Sutcliffe et al., Science 219:660-666 (1983)).

[0151] Non-limiting examples of epitopes of polypeptides that can be used to generate antibodies of the invention include a polypeptide comprising, or alternatively consisting of, at least one, two, three, four, five, six or more of the portion(s) of SEQ ID NO:Y specified in column 6 of Table 1A. These polypeptide fragments have been determined to bear antigenic epitopes of the proteins of the invention by the analysis of the Jameson-Wolf antigenic index, which is included in the DNAStar suite of computer programs. By “comprise” it is intended that a polypeptide contains at least one, two, three, four, five, six or more of the portion(s) of SEQ ID NO:Y shown in column 6 of Table 1A, but it may contain additional flanking residues on either the amino or carboxyl termini of the recited portion. Such additional flanking sequences are preferably sequences naturally found adjacent to the portion; i.e., contiguous sequence shown in SEQ ID NO:Y. The flanking sequence may, however, be sequences from a heterolgous polypeptide, such as from another protein described herein or from a heterologous polypeptide not described herein. In particular embodiments, epitope portions of a polypeptide of the invention comprise one, two, three, or more of the portions of SEQ ID NO:Y shown in column 6 of Table 1A. Polynucleotides encoding these polypeptides are also encompassed by the invention.

[0152] Similarly, immunogenic epitopes can be used, for example, to induce antibodies according to methods well known in the art. See, for instance, Sutcliffe et al., supra; Wilson et al., supra; Chow et al., Proc. Natl. Acad. Sci. USA 82:910-914; and Bittle et al., J. Gen. Virol. 66:2347-2354 (1985). Preferred immunogenic epitopes include the immunogenic epitopes disclosed herein, as well as any combination of two, three, four, five or more of these immunogenic epitopes. The polypeptides comprising one or more immunogenic epitopes may be presented for eliciting an antibody response together with a carrier protein, such as an albumin, to an animal system (such as rabbit or mouse), or, if the polypeptide is of sufficient length (at least about 25 amino acids), the polypeptide may be presented without a carrier. However, immunogenic epitopes comprising as few as 8 to 10 amino acids have been shown to be sufficient to raise antibodies capable of binding to, at the very least, linear epitopes in a denatured polypeptide (e.g., in Western blotting).

[0153] Epitope-bearing polypeptides of the present invention may be used to induce antibodies according to methods well known in the art including, but not limited to, in vivo immunization, in vitro immunization, and phage display methods. See, e.g., Sutcliffe et al., supra; Wilson et al., supra, and Bittle et al., J. Gen. Virol., 66:2347-2354 (1985). If in vivo immunization is used, animals may be immunized with free peptide; however, anti-peptide antibody titer may be boosted by coupling the peptide to a macromolecular carrier, such as keyhole limpet hemacyanin (KLH) or tetanus toxoid. For instance, peptides containing cysteine residues may be coupled to a carrier using a linker such as maleimidobenzoyl- N-hydroxysuccinimide ester (MBS), while other peptides may be coupled to carriers using a more general linking agent such as glutaraldehyde. Animals such as rabbits, rats and mice are immunized with either free or carrier- coupled peptides, for instance, by intraperitoneal and/or intradermal injection of emulsions containing about 100 μg of peptide or carrier protein and Freund's adjuvant or any other adjuvant known for stimulating an immune response. Several booster injections may be needed, for instance, at intervals of about two weeks, to provide a useful titer of anti-peptide antibody which can be detected, for example, by ELISA assay using free peptide adsorbed to a solid surface. The titer of anti-peptide antibodies in serum from an immunized animal may be increased by selection of anti-peptide antibodies, for instance, by adsorption to the peptide on a solid support and elution of the selected antibodies according to methods well known in the art.

[0154] As one of skill in the art will appreciate, and as discussed above, the polypeptides of the present invention (e.g., those comprising an immunogenic or antigenic epitope) can be fused to heterologous polypeptide sequences. For example, polypeptides of the present invention (including fragments or variants thereof), may be fused with the constant domain of immunoglobulins (IgA, IgE, IgG, IgM), or portions thereof (CH1, CH2, CH3, or any combination thereof and portions thereof, resulting in chimeric polypeptides. By way of another non-limiting example, polypeptides and/or antibodies of the present invention (including fragments or variants thereof) may be fused with albumin (including but not limited to recombinant human serum albumin or fragments or variants thereof (see, e.g., U.S. Pat. No. 5,876,969, issued Mar. 2, 1999, EP Patent 0 413 622, and U.S. Pat. No. 5,766,883, issued Jun. 16, 1998, herein incorporated by reference in their entirety)). In a preferred embodiment, polypeptides and/or antibodies of the present invention (including fragments or variants thereof) are fused with the mature form of human serum albumin (i.e., amino acids 1-585 of human serum albumin as shown in FIGS. 1 and 2 of EP Patent 0 322 094) which is herein incorporated by reference in its entirety. In another preferred embodiment, polypeptides and/or antibodies of the present invention (including fragments or variants thereof) are fused with polypeptide fragments comprising, or alternatively consisting of, amino acid residues 1-z of human serum albumin, where z is an integer from 369 to 419, as described in U.S. Pat. No. 5,766,883 herein incorporated by reference in its entirety. Polypeptides and/or antibodies of the present invention (including fragments or variants thereof) may be fused to either the N- or C-terminal end of the heterologous protein (e.g., immunoglobulin Fc polypeptide or human serum albumin polypeptide). Polynucleotides encoding fusion proteins of the invention are also encompassed by the invention.

[0155] Such fusion proteins as those described above may facilitate purification and may increase half-life in vivo. This has been shown for chimeric proteins consisting of the first two domains of the human CD4-polypeptide and various domains of the constant regions of the heavy or light chains of mammalian immunoglobulins. See, e.g., EP 394,827; Traunecker et al., Nature, 331:84-86 (1988). Enhanced delivery of an antigen across the epithelial barrier to the immune system has been demonstrated for antigens (e.g., insulin) conjugated to an FcRn binding partner such as IgG or Fc fragments (see, e.g., PCT Publications WO 96/22024 and WO 99/04813). IgG Fusion proteins that have a disulfide-linked dimeric structure due to the IgG portion desulfide bonds have also been found to be more efficient in binding and neutralizing other molecules than monomeric polypeptides or fragments thereof alone. See, e.g., Fountoulakis et al., J. Biochem., 270:3958-3964 (1995). Nucleic acids encoding the above epitopes can also be recombined with a gene of interest as an epitope tag (e.g., the hemagglutinin (HA) tag or flag tag) to aid in detection and purification of the expressed polypeptide. For example, a system described by Janknecht et al. allows for the ready purification of non-denatured fusion proteins expressed in human cell lines (Janknecht et al., 1991, Proc. Natl. Acad. Sci. USA 88:8972-897). In this system, the gene of interest is subcloned into a vaccinia recombination plasmid such that the open reading frame of the gene is translationally fused to an amino-terminal tag consisting of six histidine residues. The tag serves as a matrix binding domain for the fusion protein. Extracts from cells infected with the recombinant vaccinia virus are loaded onto Ni2+nitriloacetic acid-agarose column and histidine tagged proteins can be selectively eluted with imidazole-containing buffers.

### Fusion Proteins

[0156] Any polypeptide of the present invention can be used to generate fusion proteins. For example, the polypeptide of the present invention, when fused to a second protein, can be used as an antigenic tag. Antibodies raised against the polypeptide of the present invention can be used to indirectly detect the second protein by binding to the polypeptide. Moreover, because secreted proteins target cellular locations based on trafficking signals, polypeptides of the present invention which are shown to be secreted can be used as targeting molecules once fused to other proteins.

[0157] Examples of domains that can be fused to polypeptides of the present invention include not only heterologous signal sequences, but also other heterologous functional regions. The fusion does not necessarily need to be direct, but may occur through linker sequences.

[0158] In certain preferred embodiments, proteins of the invention are fusion proteins comprising an amino acid sequence that is an N and/or C- terminal deletion of a polypeptide of the invention. In preferred embodiments, the invention is directed to a fusion protein comprising an amino acid sequence that is at least 80%, 85%, 90%, 95%, 96%, 97%, 98% or 99% identical to a polypeptide sequence of the invention. Polynucleotides encoding these proteins are also encompassed by the invention.

[0159] Moreover, fusion proteins may also be engineered to improve characteristics of the polypeptide of the present invention. For instance, a region of additional amino acids, particularly charged amino acids, may be- added to the N-terminus of the polypeptide to improve stability and persistence during purification from the host cell or subsequent handling and storage. Also, peptide moieties may be added to the polypeptide to facilitate purification. Such regions may be removed prior to final preparation of the polypeptide. The addition of peptide moieties to facilitate handling of polypeptides is familiar and routine techniques in the art.

[0160] As one of skill in the art will appreciate that, as discussed above, polypeptides of the present invention, and epitope-bearing fragments thereof, can be combined with heterologous polypeptide sequences. For example, the polypeptides of the present invention may be fused with heterologous polypeptide sequences, for example, the polypeptides of the present invention may be fused with the constant domain of immunoglobulins (IgA, IgE, IgG, IgM) or portions thereof (CH1, CH2, CH3, and any combination thereof, including both entire domains and portions thereof), or albumin (including, but not limited to, native or recombinant human albumin or fragments or variants thereof (see, e.g., U.S. Pat. No. 5,876,969, issued Mar. 2, 1999, EP Patent 0 413 622, and U.S. Pat. No. 5,766,883, issued Jun. 16, 1998, herein incorporated by reference in their entirety)), resulting in chimeric polypeptides. For example, EP-A-O 464 533 (Canadian counterpart 2045869) discloses fusion proteins comprising various portions of constant region of immunoglobulin molecules together with another human protein or part thereof. In many cases, the Fc part in a fusion protein is beneficial in therapy and diagnosis, and thus can result in, for example, improved pharmacokinetic properties (EP-A 0232 262). Alternatively, deleting the Fc part after the fusion protein has been expressed, detected, and purified, would be desired. For example, the Fc portion may hinder therapy and diagnosis if the fusion protein is used as an antigen for immunizations. In drug discovery, for example, human proteins, such as hIL-5, have been fused with Fc portions for the purpose of high-throughput screening assays to identify antagonists of hIL-5. See, D. Bennett et al., J. Molecular Recognition 8:52-58 (1995); K. Johanson et al., J. Biol. Chem. 270:9459-9471 (1995).

[0161] Moreover, the polypeptides of the present invention can be fused to marker sequences, such as a polypeptide, which facilitates purification of the fused polypeptide. In preferred embodiments, the marker amino acid sequence is a hexa-histidine peptide, such as the tag provided in a pQE vector (QIAGEN, Inc., 9259 Eton Avenue, Chatsworth, Calif., 91311), among others, many of which are commercially available. As described in Gentz et al., Proc. Natl. Acad. Sci. USA 86:821-824 (1989), for instance, hexa-histidine provides for convenient purification of the fusion protein. Another peptide tag useful for purification, the “HA” tag, corresponds to an epitope derived from the influenza hemagglutinin protein (Wilson et al., Cell 37:767 (1984).)

[0162] Additional fusion proteins of the invention may be generated through the techniques of gene-shuffling, motif-shuffling, exon-shuffling, and/or codon-shuffling (collectively referred to as “DNA shuffling”), briefly described below, and further described herein. DNA shuffling may be employed to modulate the activities of polypeptides of the invention, such methods can be used to generate polypeptides with altered activity, as well as agonists and antagonists of the polypeptides. See, generally, U.S. Pat. Nos. 5,605,793; 5,811,238; 5,830,721; 5,834,252; and 5,837,458, and Patten et al., Curr. Opinion Biotechnol. 8:724-33 (1997); Harayama, Trends Biotechnol. 16(2):76-82 (1998); Hansson et al., J. Mol. Biol. 287:265-76 (1999); and Lorenzo and Blasco, Biotechniques 24(2):308-13 (1998); each of these patents and publications are hereby incorporated by reference in its entirety). In a preferred embodiment, one or more components, motifs, sections, parts, domains, fragments, etc., of a polynucleotide encoding a polypeptide of the invention may be recombined with one or more components, motifs, sections, parts, domains, fragments, etc., of one or more heterologous molecules encoding a heterologous polypeptide.

[0163] Thus, any of these above fusions can be engineered using the polynucleotides or the polypeptides of the present invention.

### Recombinant and Synthetic Production of Polypeptides of the Invention

[0164] The present invention also relates to vectors containing the polynucleotide of the present invention, host cells, and the production of polypeptides by synthetic and recombinant techniques. The vector may be, for example, a phage, plasmid, viral, or retroviral vector. Retroviral vectors may be replication competent or replication defective. In the latter case, viral propagation generally will occur only in complementing host cells.

[0165] The polynucleotides of the invention may be joined to a vector containing a selectable marker for propagation in a host. Generally, a plasmid vector is introduced in a precipitate, such as a calcium phosphate precipitate, or in a complex with a charged lipid. If the vector is a virus, it may be packaged in vitro using an appropriate packaging cell line and then transduced into host cells.

[0166] The polynucleotide insert should be operatively linked to an appropriate promoter, such as the phage lambda PL promoter, the E. coli lac, trp, phoa and tac promoters, the SV40 early and late promoters and promoters of retroviral LTRs, to name a few. Other suitable promoters will be known to the skilled artisan. The expression constructs will further contain sites for transcription initiation, termination, and, in the transcribed region, a ribosome binding site for translation. The coding portion of the transcripts expressed by the constructs will preferably include a translation initiating codon at the beginning and a termination codon (UAA, UGA or UAG) appropriately positioned at the end of the polypeptide to be translated.

[0167] As indicated, the expression vectors will preferably include at least one selectable marker. Such markers include dihydrofolate reductase, G418 or neomycin resistance, glutamine synthase, for eukaryotic cell culture and tetracycline, kanamycin or ampicillin resistance genes for culturing in E. coli and other bacteria. Representative examples of appropriate hosts include, but are not limited to, bacterial cells, such as E. coli, Streptomyces and Salmonella typhimurium cells; fungal cells, such as yeast cells (e.g., Saccharomyces cerevisiae or Pichia pastoris (ATCC Accession No. 201178)); insect cells such as Drosophila S2 and Spodoptera Sf9 cells; animal cells such as CHO, COS, 293, NSO and Bowes melanoma cells; and plant cells. Appropriate culture mediums and conditions for the above-described host cells are known in the art.

[0168] Among vectors preferred for use in bacteria include pQE70, pQE60 and pQE-9, available from QIAGEN, Inc.; pBluescript vectors, Phagescript vectors, pNH8A, pNH16a, pNH18A, pNH46A, available from Stratagene Cloning Systems, Inc.; and ptrc99a, pKK223-3, pKK233-3, pDR540, pRIT5 available from Pharmacia Biotech, Inc. Among preferred eukaryotic vectors are pWLNEO, pSV2CAT, pOG44, pXT1 and pSG available from Stratagene; and pSVK3, pBPV, pMSG and pSVL available from Pharmacia. Preferred expression vectors for use in yeast systems include, but are not limited to pYES2, pYD1, pTEF1/Zeo, pYES2/GS, pPICZ, pGAPZ, pGAPZalph, pPIC9, pPIC3.5, pHIL-D2, pHIL-S1, pPIC3.5K, pPIC9K, and PAO815 (all available from Invitrogen, Carlsbad, Calif.). Other suitable vectors will be readily apparent to the skilled artisan.

[0169] Vectors which use glutamine synthase (GS) or DHFR as the selectable markers can be amplified in the presence of the drugs methionine sulphoximine or methotrexate, respectively. An advantage of glutamine synthase based vectors is the availability of cell lines (e.g., the murine myeloma cell line, NSO) which are glutamine synthase negative. Glutamine synthase expression systems can also function in glutamine synthase expressing cells (e.g., Chinese Hamster Ovary (CHO) cells) by providing additional inhibitor to prevent the functioning of the endogenous gene. A glutamine synthase expression system and components thereof are detailed in PCT publications: WO87/04462; WO86/05807; WO89/01036; WO89/10404; and WO91/06657 which are hereby incorporated in their entireties by reference herein. Additionally, glutamine synthase expression vectors can be obtained from Lonza Biologics, Inc. (Portsmouth, N.H.). Expression and production of monoclonal antibodies using a GS expression system in murine myeloma cells is described in Bebbington et al., Bio/technology 10:169(1992) and in Biblia and Robinson Biotechnol. Prog. 11:1 (1995) which are herein incorporated by reference.

[0170] The present invention also relates to host cells containing the above-described vector constructs described herein, and additionally encompasses host cells containing nucleotide sequences of the invention that are operably associated with one or more heterologous control regions (e.g., promoter and/or enhancer) using techniques known of in the art. The host cell can be a higher eukaryotic cell, such as a mammalian cell (e.g., a human derived cell), or a lower eukaryotic cell, such as a yeast cell, or the host cell can be a prokaryotic cell, such as a bacterial cell. A host strain may be chosen, which modulates the expression of the inserted gene sequences, or modifies and processes the gene product in the specific fashion desired. Expression from certain promoters can be elevated in the presence of certain inducers; thus expression of the genetically engineered polypeptide may be controlled. Furthermore, different host cells have characteristics and specific mechanisms for the translational and post-translational processing and modification (e.g., phosphorylation, cleavage) of proteins. Appropriate cell lines can be chosen to ensure the desired modifications and processing of the foreign protein expressed.

[0171] Introduction of the nucleic acids and nucleic acid constructs of the invention into the host cell can be effected by calcium phosphate transfection, DEAE-dextran mediated transfection, cationic lipid-mediated transfection, electroporation, transduction, infection, or other methods. Such methods are described in many standard laboratory manuals, such as Davis et al., Basic Methods In Molecular Biology (1986). It is specifically contemplated that the polypeptides of the present invention may in fact be expressed by a host cell lacking a recombinant vector.

[0172] In addition to encompassing host cells containing the vector constructs discussed herein, the invention also encompasses primary, secondary, and immortalized host cells of vertebrate origin, particularly mammalian origin, that have been engineered to delete or replace endogenous genetic material (e.g., prostate cancer antigen coding sequence), and/or to include genetic material (e.g., heterologous polynucleotide sequences) that is operably associated with prostate cancer associated polynucleotides of the invention, and which activates, alters, and/or amplifies endogenous prostate cancer associated polynucleotides. For example, techniques known in the art may be-used to operably associate heterologous control regions (e.g., promoter and/or enhancer) and endogenous prostate cancer associated polynucleotide sequences via homologous recombination (see, e.g., U.S. Pat. No. 5,641,670, issued Jun. 24, 1997; International Publication Number WO 96/29411; International Publication Number WO 94/12650; Koller et al., Proc. Natl. Acad. Sci. USA 86:8932-8935 (1989); and Zijlstra et al., Nature 342:435-438 (1989), the disclosures of each of which are incorporated by reference in their entireties).

[0173] Polypeptides of the present invention can also be recovered from: products purified from natural sources, including bodily fluids, tissues and cells, whether directly isolated or cultured; products of chemical synthetic procedures; and products produced by recombinant techniques from a prokaryotic or eukaryotic host, including, for example, bacterial, yeast, higher plant, insect, and mammalian cells. Depending upon the host employed in a recombinant production procedure, the polypeptides of the present invention may be glycosylated or may be non-glycosylated. In addition, polypeptides of the invention may also include an initial modified methionine residue, in some cases as a result of host-mediated processes. Thus, it is well known in the art that the, N-terminal methionine encoded by the translation initiation codon generally is removed with high efficiency from any protein after translation in all eukaryotic cells. While the N-terminal methionine on most proteins also is efficiently removed in most prokaryotes, for some proteins, this prokaryotic removal process is inefficient, depending on the nature of the amino acid to which the N-terminal methionine is covalently linked.

[0174] In one embodiment, the yeast Pichia pastoris is used to express polypeptides of the invention in a eukaryotic system. Pichia pastoris is a methylotrophic yeast which can metabolize methanol as its sole carbon source. A main step in the methanol metabolization pathway is the oxidation of methanol to formaldehyde using O₂. This reaction is catalyzed by the enzyme alcohol oxidase. In order to metabolize methanol as its sole carbon source, Pichia pastoris must generate high levels of alcohol oxidase due, in part, to the relatively low affinity of alcohol oxidase for O₂. Consequently, in a growth medium depending on methanol as a main carbon source, the promoter region of one of the two alcohol oxidase genes (AOX1) is highly active. In the presence of methanol, alcohol oxidase produced from the AOX1 gene comprises up to approximately 30% of the total soluble protein in Pichia pastoris. See, Ellis, S. B., et al., Mol. Cell. Biol. 5:1111-21 (1985); Koutz, P. J, et al., Yeast 5:167-77 (1989); Tschopp, J. F., et al., Nucl. Acids Res. 15:3859-76 (1987). Thus, a heterologous coding sequence, such as, for example, a polynucleotide of the present invention, under the transcriptional regulation of all or part of the AOX1 regulatory sequence is expressed at exceptionally high levels in Pichia yeast grown in the presence of methanol.

[0175] In one example, the plasmid vector pPIC9K is used to express DNA encoding a polypeptide of the invention, as set forth herein, in a Pichea yeast system essentially as described in “Pichia Protocols: Methods in Molecular Biology,” D. R. Higgins and J. Cregg, eds. The Humana Press, Totowa, N.J., 1998. This expression vector allows expression and secretion of a polypeptide of the invention by virtue of the strong AOX1 promoter linked to the Pichia pastoris alkaline phosphatase (PHO) secretory signal peptide (i.e., leader) located upstream of a multiple cloning site.

[0176] Many other yeast vectors could be used in place of pPIC9K, such as, pYES2, pYD1, pTEF1/Zeo, pYES2/GS, pPICZ, pGAPZ, pGAPZalpha, pPIC9, pPIC3.5, pHIL-D2, pHIL-S1, pPIC3.5K, and PAO815, as one skilled in the art would readily appreciate, as long as the proposed expression construct provides appropriately located signals for transcription, translation, secretion (if desired), and the like, including an in-frame AUG as required.

[0177] In another embodiment, high-level expression of a heterologous coding sequence, such as, for example, a polynucleotide of the present invention, may be achieved by cloning the heterologous polynucleotide of the invention into an expression vector such as, for example, pGAPZ or pGAPZalpha, and growing the yeast culture in the absence of methanol.

[0178] In addition to encompassing host cells containing the vector constructs discussed herein, the invention also encompasses primary, secondary, and immortalized host cells of vertebrate origin, particularly mammalian origin, that have been engineered to delete or replace endogenous genetic material (e.g., coding sequence), and/or to include genetic material (e.g., heterologous polynucleotide sequences) that is operably associated with polynucleotides of the invention, and which activates, alters, and/or amplifies endogenous polynucleotides. For example, techniques known in the art may be used to operably associate heterologous control regions (e.g., promoter and/or enhancer) and endogenous polynucleotide sequences via homologous recombination (see, e.g., U.S. Pat. No. 5,641,670, issued Jun. 24, 1997; International Publication No. WO 96/29411, published Sep. 26, 1996; International Publication No. WO 94/12650, published Aug. 4, 1994; Koller et al., Proc. Natl. Acad. Sci. USA 86:8932-8935 (1989); and Zijlstra et al., Nature 342:435-438 (1989), the disclosures of each of which are incorporated by reference in their entireties).

[0179] In addition, polypeptides of the invention can be chemically synthesized using techniques known in the art (e.g., see Creighton, 1983, Proteins: Structures and Molecular Principles, W. H. Freeman & Co., N.Y., and Hunkapiller et al., Nature, 310:105-111 (1984)). For example, a polypeptide corresponding to a fragment of a polypeptide can be synthesized by use of a peptide synthesizer. Furthermore, if desired, nonclassical amino acids or chemical amino acid analogs can be introduced as a substitution or addition into the polypeptide sequence. Non-classical amino acids include, but are not limited to, to the D-isomers of the common amino acids, 2,4-diaminobutyric acid, a-amino isobutyric acid, 4-aminobutyric acid, Abu, 2-amino butyric acid, g-Abu, e-Ahx, 6-amino hexanoic acid, Aib, 2-amino isobutyric acid, 3-amino propionic acid, ornithine, norleucine, norvaline, hydroxyproline, sarcosine, citrulline, homocitrulline, cysteic acid, t-butylglycine, t-butylalanine, phenylglycine, cyclohexylalanine, b-alanine, fluoro-amino acids, designer amino acids such as b-methyl amino acids, Ca-methyl amino acids, Na-methyl amino acids, and amino acid analogs in general. Furthermore, the amino acid can be D (dextrorotary) or L (levorotary).

[0180] The invention encompasses polypeptides of the present invention which are differentially modified during or after translation, e.g., by glycosylation, acetylation, phosphorylation, amidation, derivatization by known protecting/blocking groups, proteolytic cleavage, linkage to an antibody molecule or other cellular ligand, etc. Any of numerous chemical modifications may be carried out by known techniques, including but not limited, to specific chemical cleavage by cyanogen bromide, trypsin, chymotrypsin, papain, V8 protease, NaBH₄; acetylation, formylation, oxidation, reduction; metabolic synthesis in the presence of tunicamycin; etc.

[0181] Additional post-translational modifications encompassed by the invention include, for example, e.g., N-linked or O-linked carbohydrate chains, processing of N-terminal or C-terminal ends), attachment of chemical moieties to the amino acid backbone, chemical modifications of N-linked or O-linked carbohydrate chains, and addition or deletion of an N-terminal methionine residue as a result of procaryotic host cell expression. The polypeptides may also be modified with a detectable label, such as an enzymatic, fluorescent, isotopic or affinity label to allow for detection and isolation of the protein.

[0182] Examples of suitable enzymes include horseradish peroxidase, alkaline phosphatase, beta-galactosidase, or acetylcholinesterase; examples of suitable prosthetic group complexes include streptavidin/biotin and avidin/biotin; examples of suitable fluorescent materials include umbelliferone, fluorescein, fluorescein isothiocyanate, rhodamine, dichlorotriazinylamine fluorescein, dansyl chloride or phycoerythrin; an example of a luminescent material includes luminol; examples of bioluminescent materials include luciferase, luciferin, and aequorin; and examples of suitable radioactive material include iodine (¹²¹I, ¹²³I, ¹²⁵I, ¹³¹I), carbon (¹⁴C), sulfur (³⁵S), tritium (³H), indium (¹¹¹In, ¹¹²In, ^{113m}In, ^{115m}In), technetium (⁹⁹Tc, ^{99m}Tc), thallium (²⁰¹Ti), gallium (⁶⁸Ga, ⁶⁷Ga), palladium (¹⁰³Pd), molybdenum (⁹⁹Mo), xenon (¹¹³Xe), fluorine (¹⁸F), ¹⁵³Sm, ¹¹⁷Lu, ¹⁵⁹Gd, ¹⁴⁹Pm, ¹⁴⁰La, ¹⁷⁵Yb, ¹⁶⁶Ho, ⁹⁰Y, ⁴⁷Sc, ¹⁸⁶Re, ¹⁸⁸Re, ¹⁴²Pr, ¹⁰⁵Rh, and ⁹⁷Ru.

[0183] In specific embodiments, a polypeptide of the present invention or fragment or variant thereof is attached to macrocyclic chelators that associate with radiometal ions, including but not limited to, ¹⁷⁷Lu, ⁹⁰Y, ¹⁶⁶Ho, and ¹⁵³Sm, to polypeptides. In a preferred embodiment, the radiometal ion associated with the macrocyclic chelators is ¹¹¹In. In another preferred embodiment, the radiometal ion associated with the macrocyclic chelator is ⁹⁰Y. In specific embodiments, the macrocyclic chelator is 1,4,7,10-tetraazacyclododecane-N,N′,N″,N′″-tetraacetic acid (DOTA). In other specific embodiments, DOTA is attached to an antibody of the invention or fragment thereof via a linker molecule. Examples of linker molecules useful for conjugating DOTA to a polypeptide are commonly known in the art—see, for example, DeNardo et al., Clin Cancer Res. 4(10):2483-90 (1998); Peterson et al., Bioconjug. Chem. 10(4):553-7 (1999); and Zimmerman et al, Nucl. Med. Biol. 26(8):943-50 (1999); which are hereby incorporated by reference in their entirety.

[0184] As mentioned, the prostate cancer associated proteins of the invention may be modified by either natural processes, such as posttranslational processing, or by chemical modification techniques which are well known in the art. It will be appreciated that the same type of modification may be present in the same or varying degrees at several sites in a given prostate cancer associated polypeptide. Prostate cancer associated polypeptides may be branched, for example, as a result of ubiquitination, and they may be cyclic, with or without branching. Cyclic, branched, and branched cyclic prostate cancer associated polypeptides may result from posttranslation natural processes or may be made by synthetic methods. Modifications include acetylation, acylation, ADP-ribosylation, amidation, covalent attachment of flavin, covalent attachment of a heme moiety, covalent attachment of a nucleotide or nucleotide derivative, covalent attachment of a lipid or lipid derivative, covalent attachment of phosphotidylinositol, cross-linking, cyclization, disulfide bond formation, demethylation, formation of covalent cross-links, formation of cysteine, formation of pyroglutamate, formylation, gamma-carboxylation, glycosylation, GPI anchor formation, hydroxylation, iodination, methylation, myristoylation, oxidation, pegylation, proteolytic processing, phosphorylation, prenylation, racemization, selenoylation, sulfation, transfer-RNA mediated addition of amino acids to proteins such as arginylation, and ubiquitination. (See, for instance, PROTEINS—STRUCTURE AND MOLECULAR PROPERTIES, 2nd Ed., T. E. Creighton, W. H. Freeman and Company, New York (1993); POSTTRANSLATIONAL COVALENT MODIFICATION OF PROTEINS, B. C. Johnson, Ed., Academic Press, New York, pgs. 1-12 (1983); Seifter et al., Meth. Enzymol. 182:626-646 (1990); Rattan et al., Ann. N.Y. Acad. Sci. 663:48-62 (1992)).

[0185] Also provided by the invention are chemically modified derivatives of the polypeptides of the invention which may provide additional advantages such as increased solubility, stability and circulating time of the polypeptide, or decreased immunogenicity (see U.S. Pat. No. 4,179,337). The chemical moieties for derivitization may be selected from water soluble polymers such as polyethylene glycol, ethylene glycol/propylene glycol copolymers, carboxymethylcellulose, dextran, polyvinyl alcohol and the like. The polypeptides may be modified at random positions within the molecule, or at predetermined positions within the molecule and may include one, two, three or more attached chemical moieties.

[0186] The polymer may be of any molecular weight, and may be branched or unbranched. For polyethylene glycol, the preferred molecular weight is between about 1 kDa and about 100 kDa (the term “about” indicating that in preparations of polyethylene glycol, some molecules will weigh more, some less, than the stated molecular weight) for ease in handling and manufacturing. Other sizes may be used, depending on the desired therapeutic profile (e.g., the duration of sustained release desired, the effects, if any on biological activity, the ease in handling, the degree or lack of antigenicity and other known effects of the polyethylene glycol to a therapeutic protein or analog). For example, the polyethylene glycol may have an average molecular weight of about 200, 500, 1000, 1500, 2000, 2500, 3000, 3500, 4000, 4500, 5000, 5500, 6000, 6500, 7000, 7500, 8000, 8500, 9000, 9500, 10,000, 10,500, 11,000, 11,500, 12,000, 12,500, 13,000, 13,500, 14,000, 14,500, 15,000, 15,500, 16,000, 16,500, 17,000, 17,500, 18,000, 18,500, 19,000, 19,500, 20,000, 25,000, 30,000, 35,000, 40,000, 50,000, 55,000, 60,000, 65,000, 70,000, 75,000, 80,000, 85,000, 90,000, 95,000, or 100,000 kDa.

[0187] As noted above, the polyethylene glycol may have a branched structure. Branched polyethylene glycols are described, for example, in U.S. Pat. No. 5,643,575; Morpurgo et al., Appl. Biochem. Biotechnol. 56:59-72 (1996); Vorobjev et al., Nucleosides Nucleotides 18:2745-2750 (1999); and Caliceti et al., Bioconjug. Chem. 10:638-646 (1999), the disclosures of each of which are incorporated herein by reference.

[0188] The polyethylene glycol molecules (or other chemical moieties) should be attached to the protein with consideration of effects on functional or antigenic domains of the protein. There are a number of attachment methods available to those skilled in the art, such as, for example, the method disclosed in EP 0 401 384 (coupling PEG to G-CSF), herein incorporated by reference; see also Malik et al., Exp. Hematol. 20:1028-1035 (1992), reporting pegylation of GM-CSF using tresyl chloride. For example, polyethylene glycol may be covalently bound through amino acid residues via a reactive group, such as a free amino or carboxyl group. Reactive groups are those to which an activated polyethylene glycol molecule may be bound. The amino acid residues having a free amino group may include lysine residues and the N-terminal amino acid residues; those having a free carboxyl group may include aspartic acid residues glutamic acid residues and the C-terminal amino acid residue. Sulfhydryl groups may also be used as a reactive group for attaching the polyethylene glycol molecules. Preferred for therapeutic purposes is attachment at an amino group, such as attachment at the N-terminus or lysine group.

[0189] As suggested above, polyethylene glycol may be attached to proteins via linkage to any of a number of amino acid residues. For example, polyethylene glycol can be linked to proteins via covalent bonds to lysine, histidine, aspartic acid, glutamic acid, or cysteine residues. One or more reaction chemistries may be employed to attach polyethylene glycol to specific amino acid residues (e.g., lysine, histidine, aspartic acid, glutamic acid, or cysteine) of the protein or to more than one type of amino acid residue (e.g., lysine, histidine, aspartic acid, glutamic acid, cysteine and combinations thereof) of the protein.

[0190] One may specifically desire proteins chemically modified at the N-terminus. Using polyethylene glycol as an illustration of the present composition, one may select from a variety of polyethylene glycol molecules (by molecular weight, branching, etc.), the proportion of polyethylene glycol molecules to protein (polypeptide) molecules in the reaction mix, the type of pegylation reaction to be performed, and the method of obtaining the selected N-terminally pegylated protein. The method of obtaining the N-terminally pegylated preparation (i.e., separating this moiety from other monopegylated moieties if necessary) may be by purification of the N-terminally pegylated material from a population of pegylated protein molecules. Selective proteins chemically modified at the N-terminus modification may be accomplished by reductive alkylation which exploits differential reactivity of different types of primary amino groups (lysine versus the N-terminal) available for derivatization in a particular protein. Under the appropriate reaction conditions, substantially selective derivatization of the protein at the N-terminus with a carbonyl group containing polymer is achieved.

[0191] As indicated above, pegylation of the proteins of the invention may be accomplished by any number of means. For example, polyethylene glycol may be attached to the protein either directly or by an intervening linker. Linkerless systems for attaching polyethylene glycol to proteins are described in Delgado et al., Crit. Rev. Thera. Drug Carrier 9:249-304 (1992); Francis et al., Intern. J. of Hematol. 68:1-18 (1998); U.S. Pat. No. 4,002,531; U.S. Pat. No. 5,349,052; WO 95/06058; and WO 98/32466, the disclosures of each of which are incorporated herein by reference.

[0192] One system for attaching polyethylene glycol directly to amino acid residues of proteins without an intervening linker employs tresylated MPEG, which is produced by the modification of monmethoxy polyethylene glycol (MPEG) using tresylchloride (ClSO₂CH₂CF₃). Upon reaction of protein with tresylated MPEG, polyethylene glycol is directly attached to amine groups of the protein. Thus, the invention includes protein-polyethylene glycol conjugates produced by reacting proteins of the invention with a polyethylene glycol molecule having a 2,2,2-trifluoreothane sulphonyl group.

[0193] Polyethylene glycol can also be attached to proteins using a number of different intervening linkers. For example, U.S. Pat. No. 5,612,460, the entire disclosure of which is incorporated herein by reference, discloses urethane linkers for connecting polyethylene glycol to proteins. Protein-polyethylene glycol conjugates wherein the polyethylene glycol is attached to the protein by a linker can also be produced by reaction of proteins with compounds such as MPEG-succinimidylsuccinate, MPEG activated with 1,1′-carbonyldiimidazole, MPEG-2,4,5-trichloropenylcarbonate, MPEG-p-nitrophenolcarbonate, and various MPEG-succinate derivatives. A number of additional polyethylene glycol derivatives and reaction chemistries for attaching polyethylene glycol to proteins are described in International Publication No. WO 98/32466, the entire disclosure of which is incorporated herein by reference. Pegylated protein products produced using the reaction chemistries set out herein are included within the scope of the invention.

[0194] The number of polyethylene glycol moieties attached to each protein of the invention (i.e., the degree of substitution) may also vary. For example, the pegylated proteins of the invention may be linked, on average, to 1, 2, 3, 4, 5, 6, 7, 8, 9, 10, 12, 15, 17, 20, or more polyethylene glycol molecules. Similarly, the average degree of substitution within ranges such as 1-3, 2-4, 3-5, 4-6, 5-7, 6-8, 7-9, 8-10, 9-11, 10-12, 11-13, 12-14, 13-15, 14-16, 15-17, 16-18, 17-19, or 18-20 polyethylene glycol moieties per protein molecule. Methods for determining the degree of substitution are discussed, for example, in Delgado et al., Crit. Rev. Thera. Drug Carrier Sys. 9:249-304 (1992).

[0195] The prostate cancer associated polypeptides of the invention can be recovered and purified from chemical synthesis and recombinant cell cultures by standard methods which include, but are not limited to, ammonium sulfate or ethanol precipitation, acid extraction, anion or cation exchange chromatography, phosphocellulose chromatography, hydrophobic interaction chromatography, affinity chromatography, hydroxylapatite chromatography and lectin chromatography. Most preferably, high performance liquid chromatography (“HPLC”) is employed for purification. Well known techniques for refolding protein may be employed to regenerate active conformation when the polypeptide is denatured during isolation and/or purification.

[0196] Prostate cancer associated polynucleotides and polypeptides may be used in accordance with the present invention for a variety of applications, particularly those that make use of the chemical and biological properties of prostate cancer associated antigens. Among these are applications in the detection, prevention, diagnosis and/or treatment of diseases associated with the prostate, such as e.g., prostate cancers such as adenocarcinoma, transitional cell carcinomas, ductal carcinomas, and squamous cell carcinomas, and as described under “Hyperproliferative Disorders” and/or “Reproductive System Disorders” below. Additional applications relate to diagnosis and to treatment of disorders of cells, tissues and organisms. These aspects of the invention are discussed further below.

[0197] In a preferred embodiment, polynucleotides expressed in a particular tissue type are used to detect, diagnose, treat, prevent and/or prognose disorders associated with the tissue type.

[0198] The polypeptides of the invention may be in monomers or multimers (i.e., dimers, trimers, tetramers and higher multimers). Accordingly, the present invention relates to monomers and multimers of the polypeptides of the invention, their preparation, and compositions (preferably, Therapeutics) containing them. In specific embodiments, the polypeptides of the invention are monomers, dimers, trimers or tetramers. In additional embodiments, the multimers of the invention are at least dimers, at least trimers, or at least tetramers.

[0199] Multimers encompassed by the invention may be homomers or heteromers. As used herein, the term homomer refers to a multimer containing only polypeptides corresponding to a protein of the invention (e.g., the amino acid sequence of SEQ ID NO:Y, an amino acid sequence encoded by SEQ ID NO:X or the complement of SEQ ID NO:X, the amino acid sequence encoded by the portion of SEQ ID NO:X as defined in columns 8 and 9 of Table 2, and/or an amino acid sequence encoded by cDNA contained in Clone ID NO:Z (including fragments, variants, splice variants, and fusion proteins, corresponding to these as described herein)). These homomers may contain polypeptides having identical or different amino acid sequences. In a specific embodiment, a homomer of the invention is a multimer containing only polypeptides having an identical amino acid sequence. In another specific embodiment, a homomer of the invention is a multimer containing polypeptides having different amino acid sequences. In specific embodiments, the multimer of the invention is a homodimer (e.g., containing two polypeptides having identical or different amino acid sequences) or a homotrimer (e.g., containing three polypeptides having identical and/or different amino acid sequences). In additional embodiments, the homomeric multimer of the invention is at least a homodimer, at least a homotrimer, or at least a homotetramer.

[0200] As used herein, the term heteromer refers to a multimer containing two or more heterologous polypeptides (i.e., polypeptides of different proteins) in addition to the polypeptides of the invention. In a specific embodiment, the multimer of the invention is a heterodimer, a heterotrimer, or a heterotetramer. In additional embodiments, the heteromeric multimer of the invention is at least a heterodimer, at least a heterotrimer, or at least a heterotetramer.

[0201] Multimers of the invention may be the result of hydrophobic, hydrophilic, ionic and/or covalent associations and/or may be indirectly linked by, for example, liposome formation. Thus, in one embodiment, multimers of the invention, such as, for example, homodimers or homotrimers, are formed when polypeptides of the invention contact one another in solution. In another embodiment, heteromultimers of the invention, such as, for example, heterotrimers or heterotetramers, are formed when polypeptides of the invention contact antibodies to the polypeptides of the invention (including antibodies to the heterologous polypeptide sequence in a fusion protein of the invention) in solution. In other embodiments, multimers of the invention are formed by covalent associations with and/or between the polypeptides of the invention. Such covalent associations may involve one or more amino acid residues contained in the polypeptide sequence (e.g., that recited in SEQ ID NO:Y, encoded by the portion of SEQ ID NO:X as defined in columns 8 and 9 of Table 2, and/or encoded by the cDNA contained in Clone ID NO:Z). In one instance, the covalent associations are cross-linking between cysteine residues located within the polypeptide sequences which interact in the native (i.e., naturally occurring) polypeptide. In another instance, the covalent associations are the consequence of chemical or recombinant manipulation. Alternatively, such covalent associations may involve one or more amino acid residues contained in the heterologous polypeptide sequence in a fusion protein. In one example, covalent associations are between the heterologous sequence contained in a fusion protein of the invention (see, e.g., U.S. Pat. No. 5,478,925). In a specific example, the covalent associations are between the heterologous sequence contained in a Fc fusion protein of the invention (as described herein). In another specific example, covalent associations of fusion proteins of the invention are between heterologous polypeptide sequence from another protein that is capable of forming covalently associated multimers, such as for example, osteoprotegerin (see, e.g., International Publication NO: WO 98/49305, the contents of which are herein incorporated by reference in its entirety). In another embodiment, two or more polypeptides of the invention are joined through peptide linkers. Examples include those peptide linkers described in U.S. Pat. No. 5,073,627 (hereby incorporated by reference). Proteins comprising multiple polypeptides of the invention separated by peptide linkers may be produced using conventional recombinant DNA technology.

[0202] Another method for preparing multimer polypeptides of the invention involves use of polypeptides of the invention fused to a leucine zipper or isoleucine zipper polypeptide sequence. Leucine zipper and isoleucine zipper domains are polypeptides that promote multimerization of the proteins in which they are found. Leucine zippers were originally identified in several DNA-binding proteins (Landschulz et al., Science 240:1759, (1988)), and have since been found in a variety of different proteins. Among the known leucine zippers are naturally occurring peptides and derivatives thereof that dimerize or trimerize. Examples of leucine zipper domains suitable for producing soluble multimeric proteins of the invention are those described in PCT application WO 94/10308, hereby incorporated by reference. Recombinant fusion proteins comprising a polypeptide of the invention fused to a polypeptide sequence that dimerizes or trimerizes in solution are expressed in suitable host cells, and the resulting soluble multimeric fusion protein is recovered from the culture supernatant using techniques known in the art.

[0203] Trimeric polypeptides of the invention may offer the advantage of enhanced biological activity. Preferred leucine zipper moieties and isoleucine moieties are those that preferentially form trimers. One example is a leucine zipper derived from lung surfactant protein D (SPD), as described in Hoppe et al. (FEBS Letters 344:191, (1994)) and in U.S. patent application Ser. No. 08/446,922, hereby incorporated by reference. Other peptides derived from naturally occurring trimeric proteins may be employed in preparing trimeric polypeptides of the invention.

[0204] In another example, proteins of the invention are associated by interactions between Flag® polypeptide sequence contained in fusion proteins of the invention containing Flag® polypeptide sequence. In a further embodiment, proteins of the invention are associated by interactions between heterologous polypeptide sequence contained in Flag® fusion proteins of the invention and anti-Flag® antibody.

[0205] The multimers of the invention may be generated using chemical techniques known in the art. For example, polypeptides desired to be contained in the multimers of the invention may be chemically cross-linked using linker molecules and linker molecule length optimization techniques known in the art (see, e.g., U.S. Pat. No. 5,478,925, which is herein incorporated by reference in its entirety). Additionally, multimers of the invention may be generated using techniques known in the art to form one or more inter-molecule cross-links between the cysteine residues located within the sequence of the polypeptides desired to be contained in the multimer (see, e.g., U.S. Pat. No. 5,478,925, which is herein incorporated by reference in its entirety). Further, polypeptides of the invention may be routinely modified by the addition of cysteine or biotin to the C-terminus or N-terminus of the polypeptide and techniques known in the art may be applied to generate multimers containing one or more of these modified polypeptides (see, e.g., U.S. Pat. No. 5,478,925, which is herein incorporated by reference in its entirety). Additionally, techniques known in the art may be applied to generate liposomes containing the polypeptide components desired to be contained in the multimer of the invention (see, e.g., U.S. Pat. No. 5,478,925, which is herein incorporated by reference in its entirety).

[0206] Alternatively, multimers of the invention may be generated using genetic engineering techniques known in the art. In one embodiment, polypeptides contained in multimers of the invention are produced recombinantly using fusion protein technology described herein or otherwise known in the art (see, e.g., U.S. Pat. No. 5,478,925, which is herein incorporated by reference in its entirety). In a specific embodiment, polynucleotides coding for a homodimer of the invention are generated by ligating a polynucleotide sequence encoding a polypeptide of the invention to a sequence encoding a linker polypeptide and then further to a synthetic polynucleotide encoding the translated product of the polypeptide in the reverse orientation from the original C-terminus to the N-terminus (lacking the leader sequence) (see, e.g., U.S. Pat. No. 5,478,925, which is herein incorporated by reference in its entirety). In another embodiment, recombinant techniques described herein or otherwise known in the art are applied to generate recombinant polypeptides of the invention which contain a transmembrane domain (or hydrophobic or signal peptide) and which can be incorporated by membrane reconstitution techniques into liposomes (see, e.g., U.S. Pat. No. 5,478,925, which is herein incorporated by reference in its entirety).

### Antibodies

[0207] Further polypeptides of the invention relate to antibodies and T-cell antigen receptors (TCR) which immunospecifically bind a polypeptide, polypeptide fragment, or variant of the invention (e.g., a polypeptide or fragment or variant of the amino acid sequence of SEQ ID NO:Y or a polypeptide encoded by the cDNA contained in Clone ID NO:Z, and/or an epitope, of the present invention) as determined by immunoassays well known in the art for assaying specific antibody-antigen binding. Antibodies of the invention include, but are not limited to, polyclonal, monoclonal, multispecific, human, humanized or chimeric antibodies, single chain antibodies, Fab fragments, F(ab′) fragments, fragments produced by a Fab expression library, anti-idiotypic (anti-Id) antibodies (including, e.g., anti-Id antibodies to antibodies of the invention), intracellularly-made antibodies (i.e., intrabodies), and epitope-binding fragments of any of the above. The term “antibody,” as used herein, refers to immunoglobulin molecules and immunologically active portions of immunoglobulin molecules, i.e., molecules that contain an antigen binding site that immunospecifically binds an antigen. The immunoglobulin molecules of the invention can be of any type (e.g., IgG, IgE, IgM, IgD, IgA and IgY), class (e.g., IgG1, IgG2, IgG3, IgG4, IgA1 and IgA2) or subclass of immunoglobulin molecule. In preferred embodiments, the immunoglobulin molecules of the invention are IgG1. In other preferred embodiments, the immunoglobulin molecules of the invention are IgG4.

[0208] Most preferably the antibodies are human antigen-binding antibody fragments of the present invention and include, but are not limited to, Fab, Fab′ and F(ab′)2, Fd, single-chain Fvs (scFv), single-chain antibodies, disulfide-linked Fvs (sdFv) and fragments comprising either a VL or VH domain. Antigen-binding antibody fragments, including single-chain antibodies, may comprise the variable region(s) alone or in combination with the entirety or a portion of the following: hinge region, CH1, CH2, and CH3 domains. Also included in the invention are antigen-binding fragments also comprising any combination of variable region(s) with a hinge region, CH1, CH2, and CH3 domains. The antibodies of the invention may be from any animal origin including birds and mammals. Preferably, the antibodies are human, murine (e.g., mouse and rat), donkey, ship rabbit, goat, guinea pig, camel, horse, or chicken. As used herein, “human” antibodies include antibodies having the amino acid sequence of a human immunoglobulin and include antibodies isolated from human immunoglobulin libraries or from animals transgenic for one or more human immunoglobulin and that do not express endogenous immunoglobulins, as described infra and, for example in, U.S. Pat. No. 5,939,598 by Kucherlapati et al.

[0209] The antibodies of the present invention may be monospecific, bispecific, trispecific or of greater multispecificity. Multispecific antibodies may be specific for different epitopes of a polypeptide of the present invention or may be specific for both a polypeptide of the present invention as well as for a heterologous epitope, such as a heterologous polypeptide or solid support material. See, e.g., PCT publications WO 93/17715; WO 92/08802; WO 91/00360; WO 92/05793; Tutt, et al., J. Immunol. 147:60-69 (1991); U.S. Pat. Nos. 4,474,893; 4,714,681; 4,925,648; 5,573,920; 5,601,819; Kostelny et al., J. Immunol. 148:1547-1553 (1992).

[0210] Antibodies of the present invention may be described or specified in terms of the epitope(s) or portion(s) of a polypeptide of the present invention which they recognize or specifically bind. The epitope(s) or polypeptide portion(s) may be specified as described herein, e.g., by N-terminal and C-terminal positions, or by size in contiguous amino acid residues, or listed in the Tables and Figures. Preferred epitopes of the invention include those shown in column 6 of Table 1A, as well as polynucleotides that encode these epitopes. Antibodies, which specifically bind any epitope or polypeptide of the present invention may also be excluded. Therefore, the present invention includes antibodies that specifically bind polypeptides of the present invention, and allows for the exclusion of the same.

[0211] Antibodies of the present invention may also be described or specified in terms of their cross-reactivity. Antibodies that do not bind any other analog, ortholog, or homolog of a polypeptide of the present invention are included. Antibodies that bind polypeptides with at least 95%, at least 90%, at least 85%, at least 80%, at least 75%, at least 70%, at least 65%, at least 60%, at least 55%, and at least 50% identity (as calculated using methods known in the art and described herein) to a polypeptide of the present invention are also included in the present invention. In specific embodiments, antibodies of the present invention cross-react with murine, rat and/or rabbit homologs of human proteins and the corresponding epitopes thereof. Antibodies that do not bind polypeptides with less than 95%, less than 90%, less than 85%, less than 80%, less than 75%, less than 70%, less than 65%, less than 60%, less than 55%, and less than 50% identity (as calculated using methods known in the art and described herein) to a polypeptide of the present invention are also included in the present invention. In a specific embodiment, the above-described cross-reactivity is with respect to any single specific antigenic or immunogenic polypeptide, or combination(s) of 2, 3, 4, 5, or more of the specific antigenic and/or immunogenic polypeptides disclosed herein. Further included in the present invention are antibodies which bind polypeptides encoded by polynucleotides which hybridize to a polynucleotide of the present invention under stringent hybridization conditions (as described herein). Antibodies of the present invention may also be described or specified in terms of their binding affinity to a polypeptide of the invention. Preferred binding affinities include those with a dissociation constant or Kd less than 5×10⁻² M, 10⁻² M, 5×10⁻³ M, 10⁻³ M, 5×10⁻⁴ M, 10⁻⁴ M, 5×10⁻⁵ M, 10⁻⁵ M, 5×10⁻⁶ M, 10⁻⁶ M, 5×10⁻⁷ M, 10⁻⁷ M, 5×10⁻⁸ M, 10⁻⁸ M, 5×10⁻⁹ M, 10⁻⁹ M, 5×10⁻¹⁰ M, 10⁻¹⁰ M, 5×10⁻¹¹ M, 10⁻¹¹ M, 5×10⁻¹² M, 10⁻¹² M, 5×10⁻¹³ M, 10⁻¹³ M, 5×10⁻¹⁴ M, 10⁻¹⁴ M, 5×10⁻¹⁵ M, or 10⁻¹⁵ M.

[0212] The invention also provides antibodies that competitively inhibit binding of an antibody to an epitope of the invention as determined by any method known in the art for determining competitive binding, for example, the immunoassays described herein. In preferred embodiments, the antibody competitively inhibits binding to the epitope by at least 95%, at least 90%, at least 85 %, at least 80%, at least 75%, at least 70%, at least 60%, or at least 50%.

[0213] Antibodies of the present invention may act as agonists or antagonists of the polypeptides of the present invention. For example, the present invention includes antibodies which disrupt the receptor/ligand interactions with the polypeptides of the invention either partially or fully. Preferably, antibodies of the present invention bind an antigenic epitope disclosed herein, or a portion thereof. The invention features both receptor-specific antibodies and ligand-specific antibodies. The invention also features receptor-specific antibodies, which do not prevent ligand binding but prevent receptor activation. Receptor activation (i.e., signaling) may be determined by techniques described herein or otherwise known in the art. For example, receptor activation can be determined by detecting the phosphorylation (e.g., tyrosine or serine/threonine) of the receptor or its substrate by immunoprecipitation followed by western blot analysis (for example, as described supra). In specific embodiments, antibodies are provided that inhibit ligand activity or receptor activity by at least 95%, at least 90%, at least 85%, at least 80%, at least 75%, at least 70%, at least 60%, or at least 50% of the activity in absence of the antibody.

[0214] The invention also features receptor-specific antibodies which both prevent ligand binding and receptor activation as well as antibodies that recognize the receptor-ligand complex, and, preferably, do not specifically recognize the unbound receptor or the unbound ligand. Likewise, included in the invention are neutralizing antibodies which bind the ligand and prevent binding of the ligand to the receptor, as well as antibodies which bind the ligand, thereby preventing receptor activation, but do not prevent the ligand from binding the receptor. Further included in the invention are antibodies, which activate the receptor. These antibodies may act as receptor agonists, i.e., potentiate or activate either all or a subset of the biological activities of the ligand-mediated receptor activation, for example, by inducing dimerization of the receptor. The antibodies may be specified as agonists, antagonists or inverse agonists for biological activities comprising the specific biological activities of the peptides of the invention disclosed herein. The above antibody agonists can be made using methods known in the art. See, e.g., PCT publication WO 96/4028 1; U.S. Pat. No. 5,811,097; Deng et al., Blood 92(6):1981-1988 (1998); Chen et al., Cancer Res. 58(16):3668-3678 (1998); Harrop et al., J. Immunol. 161(4):1786-1794 (1998); Zhu et al., Cancer Res. 58(15):3209-3214 (1998); Yoon et al., J. Immunol. 160(7):3170-3179 (1998); Prat et al., J. Cell. Sci. 111(Pt2):237-247 (1998); Pitard et al., J. Immunol. Methods 205(2):177-190 (1997); Liautard et al., Cytokine 9(4):233-241 (1997); Carlson et al., J. Biol. Chem. 272(17):11295-11301 (1997); Taryman et al., Neuron 14(4):755-762 (1995); Muller et al., Structure 6(9):1153-1167 (1998); Bartunek et a Cytokine 8(1):14-20 (1996) (which are all incorporated by reference herein in their entireties).

[0215] Antibodies of the present invention may be used, for example, to purify, detect, and target the polypeptides of the present invention, including both in vitro and in vivo diagnostic and therapeutic methods. For example, the antibodies have utility in immunoassays for qualitatively and quantitatively measuring levels of the polypeptides of the present invention in biological samples. See, e.g., Harlow et al., Antibodies: A Laboratory Manual, (Cold Spring Harbor Laboratory Press, 2nd ed. 1988); incorporated by reference herein in its entirety.

[0216] As discussed in more detail below, the antibodies of the present invention may be used either alone or in combination with other compositions. The antibodies may further be recombinantly fused to a heterologous polypeptide at the N- or C-terminus or chemically conjugated (including covalent and non-covalent conjugations) to polypeptides or other compositions. For example, antibodies of the present invention may be recombinantly fused or conjugated to molecules useful as labels in detection assays and effector molecules such as heterologous polypeptides, drugs, radionuclides, or toxins. See, e.g., PCT publications WO 92/08495; WO 91/14438; WO 89/12624; U.S. Pat. No. 5,314,995; and EP 396,387; the disclosures of which are incorporated herein by reference in their entireties.

[0217] The antibodies of the invention include derivatives that are modified, i.e., by the covalent attachment of any type of molecule to the antibody such that covalent attachment does not prevent the antibody from generating an anti-idiotypic response. For example, but not by way of limitation, the antibody derivatives include antibodies that have been modified, e.g., by glycosylation, acetylation, pegylation, phosphylation, amidation, derivatization by known protecting/blocking groups, proteolytic cleavage, linkage to a cellular ligand or other protein, etc. Any of numerous chemical modifications may be carried out by known techniques, including, but not limited to specific chemical cleavage, acetylation, formylation, metabolic synthesis of tunicamycin, etc. Additionally, the derivative may contain one or more non-classical amino acids.

[0218] The antibodies of the present invention may be generated by any suitable method known in the art. Polyclonal antibodies to an antigen-of-interest can be produced by various procedures well known in the art. For example, a polypeptide of the invention can be administered to various host animals including, but not limited to, rabbits, mice, rats, etc. to induce the production of sera containing polyclonal antibodies specific for the antigen. Various adjuvants may be used to increase the immunological response, depending on the host species, and include but are not limited to, Freund's (complete and incomplete), mineral gels such as aluminum hydroxide, surface active substances such as lysolecithin, pluronic polyols, polyanions, peptides, oil emulsions, keyhole limpet hemocyanins, dinitrophenol, and potentially useful human adjuvants such as BCG (bacille Calmette-Guerin) and corynebacterium parvum. Such adjuvants are also well known in the art.

[0219] Monoclonal antibodies can be prepared using a wide variety of techniques known in the art including the use of hybridoma, recombinant, and phage display technologies, or a combination thereof. For example, monoclonal antibodies can be produced using hybridoma techniques including those known in the art and taught, for example, in Harlow et al., Antibodies: A Laboratory Manual, (Cold Spring Harbor Laboratory Press, 2nd ed. 1988); Hammerling, et al., in: Monoclonal Antibodies and T-Cell Hybridomas 563-681 (Elsevier, N.Y., 1981) (said references incorporated by reference in their entireties). The term “monoclonal antibody” as used herein is not limited to antibodies produced through hybridoma technology. The term “monoclonal antibody” refers to an antibody that is derived from a single clone, including any eukaryotic, prokaryotic, or phage clone, and not the method by which it is produced.

[0220] Methods for producing and screening for specific antibodies using hybridoma technology are routine and well known in the art and are discussed in detail in the Examples. In a non-limiting example, mice can be immunized with a polypeptide of the invention or a cell expressing such peptide. Once an immune response is detected, e.g., antibodies specific for the antigen are detected in the mouse serum, the mouse spleen is harvested and splenocytes isolated. The splenocytes are then fused by well known techniques to any suitable myeloma cells, for example cells from cell line SP20 available from the ATCC. Hybridomas are selected and cloned by limited dilution. The hybridoma clones are then assayed by methods known in the art for cells that secrete antibodies capable of binding a polypeptide of the invention. Ascites fluid, which generally contains high levels of antibodies, can be generated by immunizing mice with positive hybridoma clones.

[0221] Accordingly, the present invention provides methods of generating monoclonal antibodies as well as antibodies produced by the method comprising culturing a hybridoma cell secreting an antibody of the invention wherein, preferably, the hybridoma is generated by fusing splenocytes isolated from a mouse immunized with an antigen of the invention with myeloma cells and then screening the hybridomas resulting from the fusion for hybridoma clones that secrete an antibody able to bind a polypeptide of the invention.

[0222] Another well known method for producing both polyclonal and monoclonal human B cell lines is transformation using Epstein Barr Virus (EBV). Protocols for generating EBV-transformed B cell lines are commonly known in the art, such as, for example, the protocol outlined in Chapter 7.22 of Current Protocols in Immunology, Coligan et al., Eds., 1994, John Wiley & Sons, NY, which is hereby incorporated in its entirety by reference herein. The source of B cells for transformation is commonly human peripheral blood, but B cells for transformation may also be derived from other sources including, but not limited to, lymph nodes, tonsil, spleen, tumor tissue, and infected tissues. Tissues are generally made into single cell suspensions prior to EBV transformation. Additionally, steps may be taken to either physically remove or inactivate T cells (e.g., by treatment with cyclosporin A) in B cell-containing samples, because T cells from individuals seropositive for anti-EBV antibodies can suppress B cell immortalization by EBV.

[0223] In general, the sample containing human B cells is innoculated with EBV, and cultured for 34 weeks. A typical source of EBV is the culture supernatant of the B95-8 cell line (ATCC #VR-1492). Physical signs of EBV transformation can generally be seen towards the end of the 3-4 week culture period. By phase-contrast microscopy, transformed cells may appear large, clear, hairy and tend to aggregate in tight clusters of cells. Initially, EBV lines are generally polyclonal. However, over prolonged periods of cell cultures, EBV lines may become monoclonal or polyclonal as a result of the selective outgrowth of particular B cell clones. Alternatively, polyclonal EBV transformed lines may be subcloned (e.g., by limiting dilution culture) or fused with a suitable fusion partner and plated at limiting dilution to obtain monoclonal B cell lines. Suitable fusion partners for EBV transformed cell lines include mouse myeloma cell lines (e.g., SP2/0, X63-Ag8.653), heteromyeloma cell lines (human x mouse; e.g., SPAM-8, SBC-H20, and CB-F7), and human cell lines (e.g., GM 1500, SKO-007, RPMI 8226, and KR-4). Thus, the present invention also provides a method of generating polyclonal or monoclonal human antibodies against polypeptides of the invention or fragments thereof, comprising EBV-transformation of human B cells.

[0224] Antibody fragments, which recognize specific epitopes may be generated by known techniques. For example, Fab and F(ab′)2 fragments of the invention may be produced by proteolytic cleavage of immunoglobulin molecules, using enzymes such as papain (to produce Fab fragments) or pepsin (to produce F(ab′)2 fragments). F(ab′)2 fragments contain the variable region, the light chain constant region and the CH1 domain of the heavy chain. For example, the antibodies of the present invention can also be generated using various phage display methods known in the art and as discussed in detail in the Examples (e.g., Example 10). In phage display methods, functional antibody domains are displayed on the surface of phage particles, which carry the polynucleotide sequences encoding them. In a particular embodiment, such phage can be utilized to display antigen binding domains expressed from a repertoire or combinatorial antibody library (e.g., human or murine). Phage expressing an antigen binding domain that binds the antigen of interest can be selected or identified with antigen, e.g., using labeled antigen or antigen bound or captured to a solid surface or bead. Phage used in these methods are typically filamentous phage including fd and M13 binding domains expressed from phage with Fab, Fv or disulfide stabilized Fv antibody domains recombinantly fused to either the phage gene III or gene VIII protein. Examples of phage display methods that can be used to make the antibodies of the present invention include those disclosed in Brinkman et al., J. Immunol. Methods 182:41-50 (1995); Ames et al., J. Immunol. Methods 184:177-186 (1995); Kettleborough et al., Eur. J. Immunol. 24:952-958 (1994); Persic et al., Gene 187 9-18 (1997); Burton et al., Advances in Immunology 57:191-280 (1994); PCT application No. PCT/GB91/01134; PCT publications WO 90/02809; WO 91/10737; WO 92/01047; WO 92/18619; WO 93/11236; WO 95/15982; WO 95/20401; and U.S. Pat. Nos. 5,698,426; 5,223,409; 5,403,484; 5,580,717; 5,427,908; 5,750,753; 5,821,047; 5,571,698; 5,427,908; 5,516,637; 5,780,225; 5,658,727; 5,733,743 and 5,969,108; each of which is incorporated herein by reference in its entirety.

[0225] As described in the above references, after phage selection, the antibody coding regions from the phage can be isolated and used to generate whole antibodies, including human antibodies, or any other desired antigen binding fragment, and expressed in any desired host, including mammalian cells, insect cells, plant cells, yeast, and bacteria, e.g., as described in detail below. For example, techniques to recombinantly produce Fab, Fab′ and F(ab′)2 fragments can also be employed using methods known in the art such as those disclosed in PCT publication WO 92/22324; Mullinax et al., BioTechniques 12(6):864-869 (1992); and Sawai et al., AJRI 34:26-34 (1995); and Better et al., Science 240:1041-1043 (1988) (said references incorporated by reference in their entireties).

[0226] Examples of techniques which can be used to produce single-chain Fvs and antibodies include those described in U.S. Pat. Nos. 4,946,778 and 5,258,498; Huston et al., Methods in Enzymology 203:46-88 (1991); Shu et al., PNAS 90:7995-7999 (1993); and Skerra et al., Science 240:1038-1040 (1988). For some uses, including in vivo use of antibodies in humans and in vitro detection assays, it may be preferable to use chimeric, humanized, or human antibodies. A chimeric antibody is a molecule in which different portions of the antibody are derived from different animal species, such as antibodies having a variable region derived from a murine monoclonal antibody and a human immunoglobulin constant region. Methods for producing chimeric antibodies are known in the art. See e.g., Morrison, Science 229:1202 (1985); Oi et al., BioTechniques 4:214 (1986); Gillies et al., (1989) J. Immunol. Methods 125:191-202; U.S. Pat. Nos. 5,807,715; 4,816,567; and 4,816,397, which are incorporated herein by reference in their entirety. Humanized antibodies are antibody molecules from non-human species antibody that binds the desired antigen having one or more complementarity determining regions (CDRs) from the non-human species and a framework regions from a human immunoglobulin molecule. Often, framework residues in the human framework regions will be substituted with the corresponding residue from the CDR donor antibody to alter, preferably improve, antigen binding. These framework substitutions are identified by methods well known in the art, e.g., by modeling of the interactions of the CDR and framework residues to identify framework residues important for antigen binding and sequence comparison to identify unusual framework residues at particular positions. (See, e.g., Queen et al., U.S. Pat. No. 5,585,089; Riechmann et al., Nature 332:323 (1988), which are incorporated herein by reference in their entireties.) Antibodies can be humanized using a variety of techniques known in the art including, for example, CDR-grafting (EP 239,400; PCT publication WO 91/09967; U.S. Pat. Nos. 5,225,539; 5,530,101; and 5,585,089), veneering or resurfacing (EP 592,106; EP 519,596; Padlan, Molecular Immunology 28(4/5):489-498 (1991); Studnicka et al., Protein Engineering 7(6):805-814 (1994); Roguska. et al., PNAS 91:969-973 (1994)), and chain shuffling (U.S. Pat. No. 5,565,332).

[0227] Completely human antibodies are particularly desirable for therapeutic treatment of human patients. Human antibodies can be made by a variety of methods known in the art including phage display methods described above using antibody libraries derived from human immunoglobulin sequences. See also, U.S. Pat. Nos. 4,444,887 and 4,716,111; and PCT publications WO 98/46645, WO 98/50433, WO 98/24893, WO 98/16654, WO 96/34096, WO 96/33735, and WO 91/10741; each of which is incorporated herein by reference in its entirety.

[0228] Human antibodies can also be produced using transgenic mice which are incapable of expressing functional endogenous, immunoglobulins, but which can express human immunoglobulin genes. For example, the human heavy and light chain immunoglobulin gene complexes may be introduced randomly or by homologous recombination into mouse embryonic stem cells. Alternatively, the human variable region, constant region, and diversity region may be introduced into mouse embryonic stem cells in addition to the human heavy and light chain genes. The mouse heavy and light chain immunoglobulin genes may be rendered non-functional separately or simultaneously with the introduction of human immunoglobulin loci by homologous recombination. In particular, homozygous deletion of the JH region prevents endogenous antibody production. The modified embryonic stem cells are expanded and microinjected into blastocysts to produce chimeric mice. The chimeric mice are then bred to produce homozygous offspring, which express human antibodies. The transgenic mice are immunized in the normal fashion with a selected antigen, e.g., all or a portion of a polypeptide of the invention. Monoclonal antibodies directed against the antigen can be obtained from the immunized, transgenic mice using conventional hybridoma technology. The human immunoglobulin transgenes harbored by the transgenic mice rearrange during B cell differentiation, and subsequently undergo class switching and somatic mutation. Thus, using such a technique, it is possible to produce therapeutically useful IgG, IgA, IgM and IgE antibodies. For an overview of this technology for producing human antibodies, see Lonberg and Huszar, Int. Rev. Immunol. 13:65-93 (1995). For a detailed discussion of this technology for producing human antibodies and human monoclonal antibodies and protocols for producing such antibodies, see, e.g., PCT publications WO 98/24893; WO 92/01047; WO 96/34096; WO 96/33735; European Patent No. 0 598 877; U.S. Pat. Nos. 5,413,923; 5,625,126; 5,633,425; 5,569,825; 5,661,016; 5,545,806; 5,814,318; 5,885,793; 5,916,771; 5,939,598; 6,075,181 and 6,114,598, which are incorporated by reference herein in their entirety. In addition, companies such as Abgenix, Inc. (Freemont, Calif.) and Genpharm (San Jose, Calif.) can be engaged to provide human antibodies directed against a selected antigen using technology similar to that described above.

[0229] Completely human antibodies which recognize a selected epitope can be generated using a technique referred to as “guided selection.” In this approach a selected non-human monoclonal antibody, e.g., a mouse antibody, is used to guide the selection of a completely human antibody recognizing the same epitope. (Jespers et al., Bio/technology 12:899-903 (1988)).

[0230] Further, antibodies to the polypeptides of the invention can, in turn, be utilized to generate anti-idiotype antibodies that “mimic” polypeptides of the invention using techniques well known to those skilled in the art. (See, e.g., Greenspan & Bona, FASEB J. 7(5):437-444; (1989) and Nissinoff, J. Immunol. 147(8):2429-2438 (1991)). For example, antibodies which bind to and competitively inhibit polypeptide multimerization and/or binding of a polypeptide of the invention to a ligand can be used to generate anti-idiotypes that “mimic” the polypeptide multimerization and/or binding domain and, as a consequence, bind to and neutralize polypeptide and/or its ligand. Such neutralizing anti-idiotypes or Fab fragments of such anti-idiotypes can be used in therapeutic regimens to neutralize polypeptide ligand/receptor. For example, such anti-idiotypic antibodies can be used to bind a polypeptide of the invention and/or to bind its ligand(s)/receptor(s), and thereby block its biological activity. Alternatively, antibodies which bind to and enhance polypeptide multimerization and/or binding, and/or receptor/ligand multimerization, binding and/or signaling can be used to generate anti-idiotypes that function as agonists of a polypeptide of the invention and/or its ligand/receptor. Such agonistic anti-idiotypes or Fab fragments of such anti-idiotypes can be used in therapeutic regimens as agonists of the polypeptides of the invention or its ligand(s)/receptor(s). For example, such anti-idiotypic antibodies can be used to bind a polypeptide of the invention and/or to bind its ligand(s)/receptor(s), and thereby promote or enhance its biological activity.

[0231] Intrabodies of the invention can be produced using methods known in the art, such as those disclosed and reviewed in Chen et al., Hum. Gene Ther. 5:595-601 (1994); Marasco, W. A., Gene Ther. 4:11-15 (1997); Rondon and Marasco, Annu. Rev. Microbiol. 51:257-283 (1997); Proba et al., J. Mol. Biol. 275:245-253 (1998); Cohen et al., Oncogene 17:2445-2456 (1998); Ohage and Steipe, J. Mol. Biol. 291:1119-1128 (1999); Ohage et al., J. Mol. Biol. 291:1129-1134 (1999); Wirtz and Steipe, Protein Sci. 8:2245-2250 (1999); Zhu et al., J. Immunol. Methods 231:207-222 (1999); and references cited therein.

### Polynucleotides Encoding Antibodies

[0232] The invention further provides polynucleotides comprising a nucleotide sequence encoding an antibody of the invention and fragments thereof. The invention also encompasses polynucleotides that hybridize under stringent or alternatively, under lower stringency hybridization conditions, e.g., as defined supra, to polynucleotides that encode an antibody, preferably, that specifically binds to a polypeptide of the invention, preferably, an antibody that binds to a polypeptide having the amino acid sequence of SEQ ID NO:Y, to a polypeptide encoded by a portion of SEQ ID NO:X as defined in columns 8 and 9 of Table 2, and/or to a polypeptide encoded by the cDNA contained in Clone ID NO:Z.

[0233] The polynucleotides may be obtained, and the nucleotide sequence of the polynucleotides determined, by any method known in the art. For example, if the nucleotide sequence of the antibody is known, a polynucleotide encoding the antibody may be assembled from chemically synthesized oligonucleotides (e.g., as described in Kutmeier et al., BioTechniques 17:242 (1994)), which, briefly, involves the synthesis of overlapping oligonucleotides containing portions of the sequence encoding the antibody, annealing and ligating of those oligonucleotides, and then amplification of the ligated oligonucleotides by PCR.

[0234] Alternatively, a polynucleotide encoding an antibody may be generated from nucleic acid from a suitable source. If a clone containing a nucleic acid encoding a particular antibody is not available, but the sequence of the antibody molecule is known, a nucleic acid encoding the immunoglobulin may be chemically synthesized or obtained from a suitable source (e.g., an antibody cDNA library, or a cDNA library generated from, or nucleic acid, preferably poly A+ RNA, isolated from, any tissue or cells expressing the antibody, such as hybridoma cells selected to express an antibody of the invention) by PCR amplification using synthetic primers hybridizable to the 3′ and 5′ ends of the sequence or by cloning using an oligonucleotide probe specific for the particular gene sequence to identify, e.g., a cDNA clone from a cDNA library that encodes the antibody. Amplified nucleic acids generated by PCR may then be cloned into replicable cloning vectors using any method well known in the art.

[0235] Once the nucleotide sequence and corresponding amino acid sequence of the antibody is determined, the nucleotide sequence of the antibody may be manipulated using methods well known in the art for the manipulation of nucleotide sequences, e.g., recombinant DNA techniques, site directed mutagenesis, PCR, etc. (see, for example, the techniques described in Sambrook et al., 1990, Molecular Cloning, A Laboratory Manual, 2d Ed., Cold Spring Harbor Laboratory, Cold Spring Harbor, N.Y. and Ausubel et al., eds., 1998, Current Protocols in Molecular Biology, John Wiley & Sons, NY, which are both incorporated by reference herein in their entireties ), to generate antibodies having a different amino acid sequence, for example to create amino acid substitutions, deletions, and/or insertions.

[0236] In a specific embodiment, the amino acid sequence of the heavy and/or light chain variable domains may be inspected to identify the sequences of the complementarity determining regions (CDRs) by methods that are well know in the art, e.g., by comparison to known amino acid sequences of other heavy and light chain variable regions to determine the regions of sequence hypervariability. Using routine recombinant DNA techniques, one or more of the CDRs may be inserted within framework regions, e.g., into human framework regions to humanize a non-human antibody, as described supra. The framework regions may be naturally occurring or consensus framework regions, and preferably human framework regions (see, e.g., Chothia et al., J. Mol. Biol. 278: 457-479 (1998) for a listing of human framework regions). Preferably, the polynucleotide generated by the combination of the framework regions and CDRs encodes an antibody that specifically binds a polypeptide of the invention. Preferably, as discussed supra, one or more amino acid substitutions may be made within the framework regions, and, preferably, the amino acid substitutions improve binding of the antibody to its antigen. Additionally, such methods may be used to make amino acid substitutions or deletions of one or more variable region cysteine residues participating in an intrachain disulfide bond to generate antibody molecules lacking one or more intrachain disulfide bonds. Other alterations to the polynucleotide are encompassed by the present invention and within the skill of the art.

[0237] In addition, techniques developed for the production of “chimeric antibodies” (Morrison et al., Proc. Natl. Acad. Sci. 81:851-855 (1984); Neuberger et al., Nature 312:604-608 (1984); Takeda et al., Nature 314:452-454 (1985)) by splicing genes from a mouse antibody molecule of appropriate antigen specificity together with genes from a human antibody molecule of appropriate biological activity can be used. As described supra, a chimeric antibody is a molecule in which different portions are derived from different animal species, such as those having a variable region derived from a murine mAb and a human immunoglobulin constant region, e.g., humanized antibodies.

[0238] Alternatively, techniques described for the production of single chain antibodies (U.S. Pat. No. 4,946,778; Bird, Science 242:423-42 (1988); Huston et al., Proc. Natl. Acad. Sci. USA 85:5879-5883 (1988); and Ward et al., Nature 334:544-54 (1989)) can be adapted to produce single chain antibodies. Single chain antibodies are formed by linking the heavy and light chain fragments of the Fv region via an amino acid bridge, resulting in a single chain polypeptide. Techniques for the assembly of functional Fv fragments in E. coli may also be used (Skerra et al., Science 242:1038-1041 (1988)).

### Methods of Producing Antibodies

[0239] The antibodies of the invention can be produced by any method known in the art for the synthesis of antibodies, in particular, by chemical synthesis or preferably, by recombinant expression techniques. Methods of producing antibodies include, but are not limited to, hybridoma technology, EBV transformation, and other methods discussed herein as well as through the use recombinant DNA technology, as discussed below.

[0240] Recombinant expression of an antibody of the invention, or fragment, derivative or analog thereof, (e.g., a heavy or light chain of an antibody of the invention or a single chain antibody of the invention), requires construction of an expression vector containing a polynucleotide that encodes the antibody. Once a polynucleotide encoding an antibody molecule or a heavy or light chain of an antibody, or portion thereof (preferably containing the heavy or light chain variable domain), of the invention has been obtained, the vector for the production of the antibody molecule may be produced by recombinant DNA technology using techniques well known in the art. Thus, methods for preparing a protein by expressing a polynucleotide containing an antibody encoding nucleotide sequence are described herein. Methods which are well known to those skilled in the art can be used to construct expression vectors containing antibody coding sequences and appropriate transcriptional and translational control signals. These methods include, for example, in vitro recombinant DNA techniques, synthetic techniques, and in vivo genetic recombination. The invention, thus, provides replicable vectors comprising a nucleotide sequence encoding an antibody molecule of the invention, or a heavy or light chain thereof, or a heavy or light chain variable domain, operably linked to a promoter. Such vectors may include the nucleotide sequence encoding the constant region of the antibody molecule (see, e.g., PCT Publication WO 86/05807; PCT Publication WO 89/01036; and U.S. Pat. No. 5,122,464) and the variable domain of the antibody may be cloned into such a vector for expression of the entire heavy or light chain.

[0241] The expression vector is transferred to a host cell by conventional techniques and the transfected cells are then cultured by conventional techniques to produce an antibody of the invention. Thus, the invention includes host cells containing a polynucleotide encoding an antibody of the invention, or a heavy or light chain thereof, or a single chain antibody of the invention, operably linked to a heterologous promoter. In preferred embodiments for the expression of double-chained antibodies, vectors encoding both the heavy and light chains may be co-expressed in the host cell for expression of the entire immunoglobulin molecule, as detailed below.

[0242] A variety of host-expression vector systems may be utilized to express the antibody molecules of the invention. Such host-expression systems represent vehicles by which the coding sequences of interest may be produced and subsequently purified, but also represent cells which may, when transformed or transfected with the appropriate nucleotide coding sequences, express an antibody molecule of the invention in situ. These include but are not limited to microorganisms such as bacteria (e.g., E. coli, B. subtilis) transformed with recombinant bacteriophage DNA, plasmid DNA or cosmid DNA expression vectors containing antibody coding sequences; yeast (e.g., Saccharomyces, Pichia) transformed with recombinant yeast expression vectors containing antibody coding sequences; insect cell systems infected with recombinant virus expression vectors (e.g., baculovirus) containing antibody coding sequences; plant cell systems infected with recombinant virus expression vectors (e.g., cauliflower mosaic virus, CaMV; tobacco mosaic virus, TMV) or transformed with recombinant plasmid expression vectors (e.g., Ti plasmid) containing antibody coding sequences; or mammalian cell systems (e.g., COS, CHO, BHK, 293, 3T3 cells) harboring recombinant expression constructs containing promoters derived from the genome of mammalian cells (e.g., metallothionein promoter) or from mammalian viruses (e.g., the adenovirus late promoter; the vaccinia virus 7.5K promoter). Preferably, bacterial cells such as Escherichia coli, and more preferably, eukaryotic cells, especially for the expression of whole recombinant antibody molecule, are used for the expression of a recombinant antibody molecule. For example, mammalian cells such as Chinese hamster ovary cells (CHO), in conjunction with a vector such as the major intermediate early gene promoter element from human cytomegalovirus is an effective expression system for antibodies (Foecking et al., Gene 45:101 (1986); Cockett et al., Bio/Technology 8:2 (1990)).

[0243] In bacterial systems, a number of expression vectors may be advantageously selected depending upon the use intended for the antibody molecule being expressed. For example, when a large quantity of such a protein is to be produced, for the generation of pharmaceutical compositions of an antibody molecule, vectors which direct the expression of high levels of fusion protein products that are readily purified may be desirable. Such vectors include, but are not limited, to the E. coli expression vector pUR278 (Ruther et al., EMBO J. 2:1791 (1983)), in which the antibody coding sequence may be ligated individually into the vector in frame with the lac Z coding region so that a fusion protein is produced; pIN vectors (Inouye & Inouye, Nucleic Acids Res. 13:3101-3109 (1985); Van Heeke & Schuster, J. Biol. Chem. 24:5503-5509 (1989)); and the like. pGEX vectors may also be used to express foreign polypeptides as fusion proteins with glutathione S-transferase (GST). In general, such fusion proteins are soluble and can easily be purified from lysed cells by adsorption and binding to matrix glutathione-agarose beads followed by elution in the presence of free glutathione. The pGEX vectors are designed to include thrombin or factor Xa protease cleavage sites so that the cloned target gene product can be released from the GST moiety.

[0244] In an insect system, Autographa californica nuclear polyhedrosis virus (AcNPV) is used as a vector to express foreign genes. The virus grows in Spodoptera frugiperda cells. The antibody coding sequence may be cloned individually into non-essential regions (for example the polyhedrin gene) of the virus and placed under control of an AcNPV promoter (for example the polyhedrin promoter).

[0245] In mammalian host cells, a number of viral-based expression systems may be utilized. In cases where an adenovirus is used as an expression vector, the antibody coding sequence of interest may be ligated to an adenovirus transcription/translation control complex, e.g., the late promoter and tripartite leader sequence. This chimeric gene may then be inserted in the adenovirus genome by in vitro or in vivo recombination. Insertion in a non-essential region of the viral genome (e.g., region E1 or E3) will result in a recombinant virus that is viable and capable of expressing the antibody molecule in infected hosts. (e.g., see Logan & Shenk, Proc. Natl. Acad. Sci. USA 81:355-359 (1984)). Specific initiation signals may also be required for efficient translation of inserted antibody coding sequences. These signals include the ATG initiation codon and adjacent sequences. Furthermore, the initiation codon must be in phase with the reading frame of the desired coding sequence to ensure translation of the entire insert. These exogenous translational control signals and initiation codons can be of a variety of origins, both natural and synthetic. The efficiency of expression may be enhanced by the inclusion of appropriate transcription enhancer elements, transcription terminators, etc. (see Bittner et al., Methods in Enzymol. 153:51-544 (1987)).

[0246] In addition, a host cell strain may be chosen which modulates the expression of the inserted sequences, or modifies and processes the gene product in the specific fashion desired. Such modifications (e.g., glycosylation) and processing (e.g., cleavage) of protein products may be important for the function of the protein. Different host cells have characteristic and specific mechanisms for the post-translational processing and modification of proteins and gene products. Appropriate cell lines or host systems can be chosen to ensure the correct modification and processing of the foreign protein expressed. To this end, eukaryotic host cells which possess the cellular machinery for proper processing of the primary transcript, glycosylation, and phosphorylation of the gene product may be used. Such mammalian host cells include but are not limited to CHO, VERY, BHK, Hela, COS, MDCK, 293, 3T3, W138, and in particular, breast cancer cell lines such as, for example, BT483, Hs578T, HTB2, BT20 and T47D, and normal mammary gland cell line such as, for example, CRL7030 and Hs578Bst. For long-term, high-yield production of recombinant proteins, stable expression is preferred. For example, cell lines, which stably express the antibody molecule may be engineered. Rather than using expression vectors which contain viral origins of replication, host cells can be transformed with DNA controlled by appropriate expression control elements (e.g., promoter, enhancer, sequences, transcription terminators, polyadenylation sites, etc.), and a selectable marker. Following the introduction of the foreign DNA, engineered cells may be allowed to grow for 1-2 days in an enriched media, and then are switched to a selective media. The selectable marker in the recombinant plasmid confers resistance to the selection and allows cells to stably integrate the plasmid into their chromosomes and grow to form foci which in turn can be cloned and expanded into cell lines. This method may advantageously be used to engineer cell lines, which express the antibody molecule. Such engineered cell lines may be particularly useful in screening and evaluation of compounds that interact directly or indirectly with the antibody molecule.

[0247] A number of selection systems may be used, including but not limited to the herpes simplex virus thymidine kinase (Wigler et al., Cell 11:223 (1977)), hypoxanthine-guanine phosphoribosyltransferase (Szybalska & Szybalski, Proc. Natl. Acad. Sci. USA 48:202 (1992)), and adenine phosphoribosyltransferase (Lowy et al., Cell 22:817 (1980)) genes can be employed in tk-, hgprt- or aprt- cells, respectively. Also, antimetabolite resistance can be used as the basis of selection for the following genes: dhfr, which confers resistance to methotrexate (Wigler et al., Natl. Acad. Sci. USA 77:357 (1980); O'Hare et al., Proc. Natl. Acad. Sci. USA 78:1527 (1981)); gpt, which confers resistance to mycophenolic acid (Mulligan & Berg, Proc. Natl. Acad. Sci. USA 78:2072 (1981)); neo, which confers resistance to the aminoglycoside G-418 Clinical Pharmacy 12:488-505; Wu and Wu, Biotherapy 3:87-95 (1991); Tolstoshev, Ann. Rev. Pharmacol. Toxicol. 32:573-596 (1993); Mulligan, Science 260:926-932 (1993); and Morgan and Anderson, Ann. Rev. Biochem. 62:191-217 (1993); TIB TECH 11(5):155-215 (1993)); and hygro, which confers resistance to hygromycin (Santerre et al., Gene 30:147 (1984)). Methods commonly known in the art of recombinant DNA technology may be routinely applied to select the desired recombinant clone, and such methods are described, for example, in Ausubel et al. (eds.), Current Protocols in Molecular Biology, John Wiley & Sons, NY (1993); Kriegler, Gene Transfer and Expression, A Laboratory Manual, Stockton Press, NY (1990); and in Chapters 12 and 13, Dracopoli et al. (eds), Current Protocols in Human Genetics, John Wiley & Sons, NY (1994); Colberre-Garapin et al., J. Mol. Biol. 150:1 (1981), which are incorporated by reference herein in their entireties.

[0248] The expression levels of an antibody molecule can be increased by vector amplification (for a review, see Bebbington and Hentschel, The use of vectors based on gene amplification for the expression of cloned genes in mammalian cells in DNA cloning, Vol.3. (Academic Press, New York, 1987)). When a marker in the vector system expressing antibody is amplifiable, increase in the level of inhibitor present in culture of host cell will increase the number of copies of the marker gene. Since the amplified region is associated with the antibody gene, production of the antibody will also increase (Crouse et al., Mol. Cell. Biol. 3:257 (1983)).

[0249] Vectors, which use glutamine synthase (GS) or DHFR as the selectable markers can be amplified in the presence of the drugs methionine sulphoximine or methotrexate, respectively. An advantage of glutamine synthase based vectors are the availability of cell lines (e.g., the murine myeloma cell line, NSO) which are glutamine synthase negative. Glutamine synthase expression systems can also function in glutamine synthase expressing cells (e.g., Chinese Hamster Ovary (CHO) cells) by providing additional inhibitor to prevent the functioning of the endogenous gene. A glutamine synthase expression system and components thereof are detailed in PCT publications: WO87/04462; WO86/05807; WO89/01036; WO89/10404; and WO91/06657, which are incorporated in their entireties by reference herein. Additionally, glutamine synthase expression vectors that may be used according to the present invention are commercially available from suppliers, including, for example Lonza Biologics, Inc. (Portsmouth, N.H.). Expression and production of monoclonal antibodies using a GS expression system in murine myeloma cells is described in Bebbington et al., Bio/technology 10:169(1992) and in Biblia and Robinson Biotechnol. Prog. 11:1 (1995) which are incorporated in their entirities by reference herein.

[0250] The host cell may be co-transfected with two expression vectors of the invention, the first vector encoding a heavy chain derived polypeptide and the second vector encoding a light chain derived polypeptide. The two vectors may contain identical selectable markers, which enable equal expression of heavy and light chain polypeptides. Alternatively, a single vector may be used which encodes, and is capable of expressing, both heavy and light chain polypeptides. In such situations, the light chain should be placed before the heavy chain to avoid an excess of toxic free heavy chain (Proudfoot, Nature 322:52 (1986); Kohler, Proc. Natl. Acad. Sci. USA 77:2197 (1980)). The coding sequences for the heavy and light chains may comprise cDNA or genomic DNA.

[0251] Once an antibody molecule of the invention has been produced by an animal, chemically synthesized, or recombinantly expressed, it may be purified by any method known in the art for purification of an immunoglobulin molecule, for example, by chromatography (e.g., ion exchange, affinity, particularly by affinity for the specific antigen after Protein A, and sizing column chromatography), centrifugation, differential solubility, or by any other standard technique for the purification of proteins. In addition, the antibodies of the present invention or fragments thereof can be fused to heterologous polypeptide sequences described herein or otherwise known in the art, to facilitate purification.

[0252] The present invention encompasses antibodies recombinantly fused or chemically conjugated (including both covalently and non-covalently conjugations) to a polypeptide (or portion thereof, preferably at least 10, 20, 30, 40, 50, 60, 70, 80, 90 or 100 amino acids of the polypeptide) of the present invention to generate fusion proteins. The fusion does not necessarily need to be direct, but may occur through linker sequences. The antibodies may be specific for antigens other than polypeptides (or portion thereof, preferably at least 10, 20, 30, 40, 50, 60, 70, 80, 90 or 100 amino acids of the polypeptide) of the present invention. For example, antibodies may be used to target the polypeptides of the present invention to particular cell types, either in vitro or in vivo, by fusing or conjugating the polypeptides of the present invention to antibodies specific for particular cell surface receptors. Antibodies fused or conjugated to the polypeptides of the present invention may also be used in in vitro immunoassays and purification methods using methods known in the art. See e.g., Harbor et al., supra, and PCT publication WO 93/21232; EP 439,095; Naramura et al., Immunol. Lett. 39:91-99 (1994); U.S. Pat. No. 5,474,981; Gillies et al., PNAS 89:1428-1432 (1992); Fell et al., J. Immunol. 146:2446-2452 (1991), which are incorporated by reference in their entireties.

[0253] The present invention further includes compositions comprising the polypeptides of the present invention fused or conjugated to antibody domains other than the variable regions. For example, the polypeptides of the present invention may be fused or conjugated to an antibody Fc region, or portion thereof. The antibody portion fused to a polypeptide of the present invention may comprise the constant region, hinge region, CH1 domain, CH2 domain, and CH3 domain or any combination of whole domains or portions thereof. The polypeptides may also be fused or conjugated to the above antibody portions to form multimers. For example, Fc portions fused to the polypeptides of the present invention can form dimers through disulfide bonding between the Fc portions. Higher multimeric forms can be made by fusing the polypeptides to portions of IgA and IgM. Methods for fusing or conjugating the polypeptides of the present invention to antibody portions are known in the art. See, e.g., U.S. Pat. Nos. 5,336,603; 5,622,929; 5,359,046; 5,349,053; 5,447,851; 5,112,946; EP 307,434; EP 367,166; PCT publications WO 96/04388; WO 91/06570; Ashkenazi et al., Proc. Natl. Acad. Sci. USA 88:10535-10539 (1991); Zheng et al., J. Immunol. 154:5590-5600 (1995); and Vil et al., Proc. Natl. Acad. Sci. USA 89:11337-11341 (1992) (said references incorporated by reference in their entireties).

[0254] As discussed, supra, the polypeptides corresponding to a polypeptide, polypeptide fragment, or a variant of SEQ ID NO:Y may be fused or conjugated to the above antibody portions to increase the in vivo half life of the polypeptides or for use in immunoassays using methods known in the art. Further, the polypeptides corresponding to SEQ ID NO:Y may be fused or conjugated to the above antibody portions to facilitate purification. One reported example describes chimeric proteins consisting Qf the first two domains of the human CD4-polypeptide and various domains of the constant regions of the heavy or light chains of mammalian immunoglobulins. See EP 394,827; Traunecker et al., Nature 331:84-86 (1988). The polypeptides of the present invention fused or conjugated to an antibody having disulfide-linked dimeric structures (due to the IgG) may also be more efficient in binding and neutralizing other molecules, than the monomeric secreted protein or protein fragment alone. See, for example, Fountoulakis et al., J. Biochem. 270:3958-3964 (1995). In many cases, the Fc part in a fusion protein is beneficial in therapy and diagnosis, and thus can result in, for example, improved pharmacokinetic properties. See, for example, EP A 232,262. Alternatively, deleting the Fc part after the fusion protein has been expressed, detected, and purified, would be desired. For example, the Fc portion may hinder therapy and diagnosis if the fusion protein is used as an antigen for immunizations. In drug discovery, for example, human proteins, such as hIL-5, have been fused with Fc portions for the purpose of high-throughput screening assays to identify antagonists of hIL-5. (See, Bennett et al., J. Molecular Recognition 8:52-58 (1995); Johanson et al., J. Biol. Chem. 270:9459-9471 (1995)).

[0255] Moreover, the antibodies or fragments thereof of the present invention can be fused to marker sequences, such as a peptide to facilitate purification. In preferred embodiments, the marker amino acid sequence is a hexa-histidine peptide, such as the tag provided in a pQE vector (QIAGEN, Inc., 9259 Eton Avenue, Chatsworth, Calif., 91311), among others, many of which are commercially available. As described in Gentz et al., Proc. Natl. Acad. Sci. USA 86:821-824 (1989), for instance, hexa-histidine provides for convenient purification of the fusion protein. Other peptide tags useful for purification include, but are not limited to, the “HA” tag, which corresponds to an epitope derived from the influenza hemagglutinin protein (Wilson et al., Cell 37:767 (1984)) and the “flag” tag.

[0256] The present invention further encompasses antibodies or fragments thereof conjugated to a diagnostic or therapeutic agent. The antibodies can be used diagnostically to, for example, monitor the development or progression of a tumor as part of a clinical testing procedure to, e.g., determine the efficacy of a given treatment regimen. Detection can be facilitated by coupling the antibody to a detectable substance. Examples of detectable substances include various enzymes, prosthetic groups, fluorescent materials, luminescent materials, bioluminescent materials, radioactive materials, positron emitting metals using various positron emission tomographies, and nonradioactive paramagnetic metal ions. The detectable substance may be coupled or conjugated either directly to the antibody (or fragment thereof) or indirectly, through an intermediate (such as, for example, a linker known in the art) using techniques known in the art. See, for example, U.S. Pat. No. 4,741,900 for metal ions which can be conjugated to antibodies for use as diagnostics according to the present invention.

[0257] Further, an antibody or fragment thereof may be conjugated to a therapeutic moiety such as a cytotoxin, e.g., a cytostatic or cytocidal agent, a therapeutic agent or a radioactive metal ion, e.g., alpha-emitters such as, for example, 213Bi. A cytotoxin or cytotoxic agent includes any agent that is detrimental to cells. Examples include paclitaxol, cytochalasin B, gramicidin D, ethidium bromide, emetine, mitomycin, etoposide, tenoposide, vincristine, vinblastine, colchicin, doxorubicin, daunorubicin, dihydroxy anthracin dione, mitoxantrone, mithramycin, actinomycin D, 1-dehydrotestosterone, glucocorticoids, procaine; tetracaine, lidocaine, propranolol, and puromycin and analogs or homologs thereof. Therapeutic agents include, but are not limited to, antimetabolites (e.g., methotrexate, 6-mercaptopurine, 6-thioguanine, cytarabine, 5-fluorouracil decarbazine), alkylating agents (e.g., mechlorethamine, thioepa chlorambucil, melphalan, carmustine (BSNU) and lomustine (CCNU), cyclothosphamide, busulfan, dibromomannitol, streptozotocin, mitomycin C, and cis-dichlorodiamine platinum (II) (DDP) cisplatin), anthracyclines (e.g., daunorubicin (formerly daunomycin) and doxorubicin), antibiotics (e.g., dactinomycin (formerly actinomycin), bleomycin, mithramycin, and anthramycin (AMC)), and anti-mitotic agents (e.g., vincristine and vinblastine).

[0258] The conjugates of the invention can be used for modifying a given biological response, the therapeutic agent or drug moiety is not to be construed as limited to classical chemical therapeutic agents. For example, the drug moiety may be a protein or polypeptide possessing a desired biological activity. Such proteins may include, for example, a toxin such as abrin, ricin A, pseudomonas exotoxin, or diphtheria toxin; a protein such as tumor necrosis factor, a-interferon, β-interferon, nerve growth factor, platelet derived growth factor, tissue plasminogen activator, an apoptotic agent, e.g., TNF-alpha, TNF-beta, AIM I (See, International Publication No. WO 97/33899), AIM II (See, International Publication No. WO 97/34911), Fas Ligand (Takahashi et al., Int. Immunol., 6:1567-1574 (1994)), VEGI (See, International Publication No. WO 99/23105), a thrombotic agent or an anti-angiogenic agent, e.g., angiostatin or endostatin; or, biological response modifiers such as, for example, lymphokines, interleukin-1 (“IL1”), interleukin-2 (“IL-2”), interleukin-6 (“IL-6”), granulocyte macrophage colony stimulating factor (“GM-CSF”), granulocyte colony stimulating factor (“G-CSF”), or other growth factors.

[0259] Antibodies may also be attached to solid supports, which are particularly useful for immunoassays or purification of the target antigen. Such solid supports include, but are not limited to, glass, cellulose, polyacrylamide, nylon, polystyrene, polyvinyl chloride or polypropylene.

[0260] Techniques for conjugating such therapeutic moiety to antibodies are well known. See, for example, Arnon et al., “Monoclonal Antibodies For Immunotargeting Of Drugs In Cancer Therapy”, in Monoclonal Antibodies And Cancer Therapy, Reisfeld et al. (eds.), pp. 243-56 (Alan R. Liss, Inc. -1985); Hellstrom et al., “Antibodies For Drug Delivery”, in Controlled Drug Delivery (2nd Ed.), Robinson et al. (eds.), pp. 623-53 (Marcel Dekker, Inc. 1987); Thorpe, “Antibody Carriers Of Cytotoxic Agents In Cancer Therapy: A Review”, in Monoclonal Antibodies '84: Biological And Clinical Applications, Pinchera et al. (eds.), pp. 475-506 (1985); “Analysis, Results, And Future Prospective Of The Therapeutic Use Of Radiolabeled Antibody In Cancer Therapy”, in Monoclonal Antibodies For Cancer Detection And Therapy, Baldwin et al. (eds.), pp. 303-16 (Academic Press 1985), and Thorpe et al., “The Preparation And Cytotoxic Properties Of Antibody-Toxin Conjugates”, Immunol. Rev. 62:119-58 (1982).

[0261] Alternatively, an antibody can be conjugated to a second antibody to form an antibody heteroconjugate as described by Segal in U.S. Pat. No. 4,676,980, which is incorporated herein by reference in its entirety.

[0262] An antibody, with or without a therapeutic moiety conjugated to it, administered alone or in combination with cytotoxic factor(s) and/or cytokine(s) can be used as a therapeutic.

### Immunophenotyping

[0263] The antibodies of the invention may be utilized for immunophenotyping of cell lines and biological samples. Translation products of the genes of the present invention may be useful as cell specific markers, or more specifically as cellular markers that are differentially expressed at various stages of differentiation and/or maturation of particular cell types. Monoclonal antibodies directed against a specific epitope, or combination of epitopes, will allow for the screening of cellular populations expressing the marker. Various techniques can be utilized using monoclonal antibodies to screen for cellular populations expressing the marker(s), and include magnetic separation using antibody-coated magnetic beads, “panning” with antibody attached to a solid matrix (i.e., plate), and flow cytometry (See, e.g., U.S. Pat. No. 5,985,660; and Morrison et al., Cell, 96:737-49 (1999)).

[0264] These techniques allow for the screening of particular populations of cells, such as might be found with hematological malignancies (i.e. minimal residual disease (MRD) in acute leukemic patients) and “non-self” cells in transplantations to prevent Graft-versus-Host Disease (GVHD). Alternatively, these techniques allow for the screening of hematopoietic stem and progenitor cells capable of undergoing proliferation and/or differentiation, as might be found in human umbilical cord blood.

### Assays For Antibody Binding

[0265] The antibodies of the invention may be assayed for immunospecific binding by any method known in the art. The immunoassays which can be used include but are not limited to competitive and non-competitive assay systems using techniques such as western blots, radioimmunoassays, ELISA (enzyme linked immunosorbent assay), “sandwich” immunoassays, immunoprecipitation assays, precipitin reactions, gel diffusion precipitin reactions, immunodiffusion assays, agglutination assays, complement-fixation assays, immunoradiometric assays, fluorescent immunoassays, and protein A immunoassays, to name but a few. Such assays are routine and well known in the art (see, e.g., Ausubel et al, eds, 1994, Current Protocols in Molecular Biology, Vol. 1, John Wiley & Sons, Inc., New York, which is incorporated by reference herein in its entirety). Exemplary immunoassays are described briefly below (but are not intended by way of limitation).

[0266] Immunoprecipitation protocols generally comprise lysing a population of cells in a lysis buffer such as RIPA buffer (1% NP-40 or Triton X-100, 1% sodium deoxycholate, 0.1% SDS, 0.15 M NaCl, 0.01 M sodium phosphate at pH 7.2, 1% Trasylol) supplemented with protein phosphatase and/or protease inhibitors (e.g., EDTA, PMSF, aprotinin, sodium vanadate), adding the antibody of interest to the cell lysate, incubating for a period of time (e.g., 1-4 hours) at 4° C., adding protein A and/or protein G sepharose beads to the cell lysate, incubating for about an hour or more at 4° C., washing the beads in lysis buffer and resuspending the beads in SDS/sample buffer. The ability of the antibody of interest to immunoprecipitate a particular antigen can be assessed by, e.g., western blot analysis. One of skill in the art would be knowledgeable as to the parameters that can be modified to increase the binding of the antibody to an antigen and decrease the background (e.g., pre-clearing the cell lysate with sepharose beads). For further discussion regarding immunoprecipitation protocols see, e.g., Ausubel et al., eds., (1994), Current Protocols in Molecular Biology, Vol. 1, John Wiley & Sons, Inc., New York, section 10.16.1.

[0267] Western blot analysis generally comprises preparing protein samples, electrophoresis of the protein samples in a polyacrylamide gel (e.g., 8%-20% SDS-PAGE depending on the molecular weight of the antigen), transferring the protein sample from the polyacrylamide gel to a membrane such as nitrocellulose, PVDF or nylon, blocking the membrane in blocking solution (e.g., PBS with 3% BSA or non-fat milk), washing the membrane in washing buffer (e.g., PBS-Tween 20), blocking the membrane with primary antibody (the antibody of interest) diluted in blocking buffer, washing the membrane in washing buffer, blocking the membrane with a secondary antibody (which recognizes the primary antibody, e.g., an anti-human antibody) conjugated to an enzymatic substrate (e.g., horseradish peroxidase or alkaline phosphatase) or radioactive molecule (e.g., 32P or 1251) diluted in blocking buffer, washing the membrane in wash buffer, and detecting the presence of the antigen. One of skill in the art would be knowledgeable as to the parameters that can be modified to increase the signal detected and to reduce the background noise. For further discussion regarding western blot protocols see, e.g., Ausubel et al., eds., (1994), Current Protocols in Molecular Biology, Vol. 1, John Wiley & Sons, Inc., New York, section 10.8.1.

[0268] ELISAs comprise preparing antigen, coating the well of a 96 well microtiter plate with the antigen, adding the antibody of interest conjugated to a detectable compound such as an enzymatic substrate (e.g., horseradish peroxidase or alkaline phosphatase) to the well and incubating for a period of time, and detecting the presence of the antigen. In ELISAs the antibody of interest does not have to be conjugated to a detectable compound; instead, a second antibody (which recognizes the antibody of interest) conjugated to a detectable compound may be added to the well. Further, instead of coating the well with the antigen, the antibody may be coated to the well. In this case, a second antibody conjugated to a detectable compound may be added following the addition of the antigen of interest to the coated well. One of skill in the art would be knowledgeable as to the parameters that can be modified to increase the signal detected as well as other variations of ELISAs known in the art. For further discussion regarding ELISAs see, e.g., Ausubel et al., eds, (1994), Current Protocols in Molecular Biology, Vol. 1, John Wiley & Sons, Inc., New York, section 11.2.1.

[0269] The binding affinity of an antibody to an antigen and the off-rate of an antibody-antigen interaction can be determined by competitive binding assays. One example of a competitive binding assay is a radioimmunoassay comprising the incubation of labeled antigen (e.g., 3H or 125I) with the antibody of interest in the presence of increasing amounts of unlabeled antigen, and the detection of the antibody bound to the labeled antigen. The affinity of the antibody of interest for a particular antigen and the binding off-rates can be determined from the data by scatchard plot analysis. Competition with a second antibody can also be determined using radioimmunoassays. In this case, the antigen is incubated with antibody of interest conjugated to a labeled compound (e.g., 3H or 125I) in the presence of increasing amounts of an unlabeled second antibody.

[0270] Antibodies of the invention may be characterized using immunocytochemisty methods on cells (e.g., mammalian cells, such as CHO cells) transfected with a vector enabling the expression of a prostate cancer antigen or with vector alone using techniques commonly known in the art. Antibodies that bind prostate cancer antigen transfected cells, but not vector-only transfected cells, are prostate cancer antigen specific.

### Therapeutic Uses

[0271] The present invention is further directed to antibody-based therapies which involve administering antibodies of the invention to an animal, preferably a mammal, and most preferably a human, patient for treating one or more of the disclosed diseases, disorders, or conditions. Therapeutic compounds of the invention include, but are not limited to, antibodies of the invention (including fragments, analogs and derivatives thereof as described herein) and nucleic acids encoding antibodies of the invention (including fragments, analogs and derivatives thereof and anti-idiotypic antibodies as described herein). The antibodies of the invention can be used to treat, inhibit or prevent diseases, disorders or conditions associated with aberrant expression and/or activity of a polypeptide of the invention, including, but not limited to, any one or more of the diseases, disorders, or conditions described herein. The treatment and/or prevention of diseases, disorders, or conditions associated with aberrant expression and/or activity of a polypeptide of the invention includes, but is not limited to, alleviating symptoms associated with those diseases, disorders or conditions. Antibodies of the invention may be provided in pharmaceutically acceptable compositions as known in the art or as described herein.

[0272] In a specific and preferred embodiment, the present invention is directed to antibody-based therapies which involve administering antibodies of the invention to an animal, preferably a mammal, and most preferably a human, patient for treating one or more of the diseases, disorders, or conditions of the prostate, including, but not limited to, prostate cancers such as adenocarcinoma, transitional cell carcinomas, ductal carcinomas, and squamous cell carcinomas, and as described under “Hyperproliferative Disorders” and/or “Reproductive System Disorders” below. Therapeutic compounds of the invention include, but are not limited to, antibodies of the invention,(e.g., antibodies directed to the full length protein expressed on the cell surface of a mammalian cell; antibodies directed to an epitope of a prostate cancer associated polypeptide of the invention (such as, a linear epitope (shown in Table 1A, column 6) or a conformational epitope), including fragments, analogs and derivatives thereof as described herein) and nucleic acids encoding antibodies of the invention (including fragments, analogs and derivatives thereof and anti-idiotypic antibodies as described herein). The antibodies of the invention can be used to treat, inhibit or prevent diseases, disorders or conditions associated with aberrant expression and/or activity of a polypeptide of the invention, including, but not limited to, any one or more of the diseases, disorders, or conditions of the prostate described herein. The treatment and/or prevention of diseases, disorders, or conditions of the prostate cancer associated with aberrant expression and/or activity of a polypeptide of the invention includes, but is not limited to, alleviating symptoms associated with those diseases, disorders or conditions. Antibodies of the invention may be provided in pharmaceutically acceptable compositions as known in the art or as described herein.

[0273] A summary of the ways in which the antibodies of the present invention may be used therapeutically includes binding polynucleotides or polypeptides of the present invention locally or systemically in the body or by direct cytotoxicity of the antibody, e.g. as mediated by complement (CDC) or by effector cells (ADCC). Some of these approaches are described in more detail below. Armed with the teachings provided herein, one of ordinary skill in the art will know how to use the antibodies of the present invention for diagnostic, monitoring or therapeutic purposes without undue experimentation.

[0274] The antibodies of this invention may be advantageously utilized in combination with other monoclonal or chimeric antibodies, or with lymphokines or hematopoietic growth factors (such as, e.g., IL-2, IL-3 and IL-7), for example, which serve to increase the number or activity of effector cells which interact with the antibodies.

[0275] The antibodies of the invention may be administered alone or in combination with other types of treatments (e.g., radiation therapy, chemotherapy, hormonal therapy, immunotherapy and anti-tumor agents). Generally, administration of products of a species origin or species reactivity (in the case of antibodies) that is the same species as that of the patient is preferred. Thus, in a preferred embodiment, human antibodies, fragments derivatives, analogs, or nucleic acids, are administered to a human patient for therapy or prophylaxis.

[0276] It is preferred to use high affinity and/or potent in vivo inhibiting and/or neutralizing antibodies against polypeptides or polynucleotides of the present invention, fragments or regions thereof, for both immunoassays directed to and therapy of disorders related to polynucleotides or polypeptides, including fragments thereof, of the present invention. Such antibodies, fragments, or regions, will preferably have an affinity for polynucleotides or polypeptides of the invention, including fragments thereof. Preferred binding affinities include those with a dissociation constant or Kd less than 5×10⁻² M, 10⁻² M, 5×10⁻³ M, 10⁻³ M, 5×10⁻⁴ M, 10⁻⁴ M, 5×10⁻⁵ M, 10⁻⁵ M, 5×10⁻⁶ M, 10⁻⁶ M, 5×10⁻⁷ M, 10⁻⁷ M, 5×10⁻⁸ M, 10⁻⁸ M, 5×10⁻⁹ M, 10⁻⁹ M, 5×10⁻¹⁰ M, 10⁻¹⁰ M, 5×10⁻¹¹ M, 10⁻¹¹ M, 5×10⁻¹² M, 10⁻¹² M, 5×10⁻¹³ M, 10⁻¹³ M, 5×10⁻¹⁴ M, 10⁻¹⁴ M, 5×10⁻¹⁵ M, and 10⁻¹⁵ M.

### Gene Therapy

[0277] In a specific embodiment, nucleic acids comprising sequences encoding antibodies or functional derivatives thereof, are administered to treat, inhibit or prevent a disease or disorder associated with aberrant expression and/or activity of a polypeptide of the invention, by way of gene therapy. Gene therapy refers to therapy performed by the administration to a subject of an expressed or expressible nucleic acid. In this embodiment of the invention, the nucleic acids produce their encoded protein that mediates a therapeutic effect.

[0278] Any of the methods for gene therapy available in the art can be used according to the present invention. Exemplary methods are described below.

[0279] For general reviews of the methods of gene therapy, see Goldspiel et al., Clinical Pharmacy 12:488-505 (1993); Wu and Wu, Biotherapy 3:87-95 (1991); Tolstoshev, Ann. Rev. Pharmacol. Toxicol. 32:573-596 (1993); Mulligan, Science 260:926-932 (1993); and Morgan and Anderson, Ann. Rev. Biochem., 62:191-217 (1993); May, TIBTECH 11(5):155-215 (1993). Methods commonly known in the art of recombinant DNA technology which can be used are described in Ausubel et al. (eds.), Current Protocols in Molecular Biology, John Wiley & Sons, NY (1993); and Kriegler, Gene Transfer and Expression, A Laboratory Manual, Stockton Press, NY (1990).

[0280] In a preferred embodiment, the compound comprises nucleic acid sequences encoding an antibody, said nucleic acid sequences being part of expression vectors that express the antibody or fragments or chimeric proteins or heavy or light chains thereof in a suitable host. In particular, such nucleic acid sequences have promoters operably linked to the antibody coding region, said promoter being inducible or constitutive, and, optionally, tissue-specific. In another particular embodiment, nucleic acid molecules are used in which the antibody coding sequences and any other desired sequences are flanked by regions that promote homologous recombination at a desired site in the genome, thus providing for intrachromosomal expression of the antibody encoding nucleic acids (Koller and Smithies, Proc. Natl. Acad. Sci. USA 86:8932-8935 (1989); Zijlstra et al., Nature 342:435-438 (1989). In specific embodiments, the expressed antibody molecule is a single chain antibody; alternatively, the nucleic acid sequences include sequences encoding both the heavy and light chains, or fragments thereof, of the antibody.

[0281] Delivery of the nucleic acids into a patient may be either direct, in which case the patient is directly exposed to the nucleic acid or nucleic acid- carrying vectors, or indirect, in which case, cells are first transformed with the nucleic acids in vitro, then transplanted into the patient. These two approaches are known, respectively, as in vivo or ex vivo gene therapy.

[0282] In a specific embodiment, the nucleic acid sequences are directly administered in vivo, where it is expressed to produce the-encoded product. This can be accomplished by any of numerous methods known in the art, e.g., by constructing them as part of an appropriate nucleic acid expression vector and administering it so that they become intracellular, e.g., by infection using defective or attenuated retrovirals or other viral vectors (see U.S. Pat. No. 4,980,286), or by direct injection of naked DNA, or by use of microparticle bombardment (e.g., a gene gun; Biolistic, Dupont), or coating with lipids or cell-surface receptors or transfecting agents, encapsulation in liposomes, microparticles, or microcapsules, or by administering them in linkage to a peptide which is known to enter the nucleus, by administering it in linkage to a ligand subject to receptor-mediated endocytosis (see, e.g., Wu and Wu, J. Biol. Chem. 262:4429-4432 (1987)) (which can be used to target cell types specifically expressing the receptors), etc. In another embodiment, nucleic acid-ligand complexes can be formed in which the ligand comprises a fusogenic viral peptide to disrupt endosomes, allowing the nucleic acid to avoid lysosomal degradation. In yet another embodiment, the nucleic acid can be targeted in vivo for cell specific uptake and expression, by targeting a specific receptor (see, e.g., PCT Publications WO 92/06180; WO 92/22635; WO92/20316; WO93/14188, WO 93/20221). Alternatively, the nucleic acid can be introduced intracellularly and incorporated within host cell DNA for expression, by homologous recombination (Koller and Smithies, Proc. Natl. Acad. Sci. USA 86:8932-8935 (1989); Zijlstra et al., Nature 342:435438 (1989)).

[0283] In a specific embodiment, viral vectors that contains nucleic acid sequences encoding an antibody of the invention are used. For example, a retroviral vector can be used (see Miller et al., Meth. Enzymol. 217:581-599 (1993)). These retroviral vectors contain the components necessary for the correct packaging of the viral genome and integration into the host cell DNA. The nucleic acid sequences encoding the antibody to be used in gene therapy are cloned into one or more vectors, which facilitates delivery of the gene into a patient. More detail about retroviral vectors can be found in Boesen et al., Biotherapy 6:291-302 (1994), which describes the use of a retroviral vector to deliver the mdr1 gene to hematopoietic stem cells in order to make the stem cells more resistant to chemotherapy. Other references illustrating the use of retroviral vectors in gene therapy are: Clowes et al., J. Clin. Invest. 93:644-651 (1994); Kiem et al., Blood 83:1467-1473 (1994); Salmons and Gunzberg, Human Gene Therapy 4:129-141 (1993); and Grossman and Wilson, Curr. Opin. in Genetics and Devel. 3:110-114 (1993).

[0284] Adenoviruses are other viral vectors that can be used in gene therapy. Adenoviruses are especially attractive vehicles for delivering genes to respiratory epithelia. Adenoviruses naturally infect respiratory epithelia where they cause a mild disease. Other targets for adenovirus-based delivery systems are liver, the central nervous system, endothelial cells, and muscle. Adenoviruses have the advantage of being capable of infecting non-dividing cells. Kozarsky and Wilson, Current Opinion in Genetics and Development 3:499-503 (1993) present a review of adenovirus-based gene therapy. Bout et al., Human Gene Therapy 5:3-10 (1994) demonstrated the use of adenovirus vectors to transfer genes to the respiratory epithelia of rhesus monkeys. Other instances of the use of adenoviruses in gene therapy can be found in Rosenfeld et al., Science 252:431-434 (1991); Rosenfeld et al., Cell 68:143-155 (1992); Mastrangeli et al., J. Clin. Invest. 91:225-234 (1993); PCT Publication WO94/12649; and Wang, et al., Gene Therapy 2:775-783 (1995). In a preferred embodiment, adenovirus vectors are used.

[0285] Adeno-associated virus (AAV) has also been proposed for use in gene therapy (Walsh et al., Proc. Soc. Exp. Biol. Med. 204:289-300 (1993); U.S. Pat. No. 5,436,146).

[0286] Another approach to gene therapy involves transferring a gene to cells in tissue culture by such methods as electroporation, lipofection, calcium phosphate mediated transfection, or viral infection. Usually, the method of transfer includes the transfer of a selectable marker to the cells. The cells are then placed under selection to isolate those cells that have taken up and are expressing the transferred gene. Those cells are then delivered to a patient.

[0287] In this embodiment, the nucleic acid is introduced into a cell prior to administration in vivo of the resulting recombinant cell. Such introduction can be carried out by any method known in the art, including but not limited to transfection, electroporation, microinjection, infection with a viral or bacteriophage vector containing the nucleic acid sequences, cell fusion, chromosome-mediated gene transfer, microcell-mediated gene transfer, spheroplast fusion, etc. Numerous techniques are known in the art for the introduction of foreign genes into cells (see, e.g., Loeffler and Behr, Meth. Enzymol. 217:599-618 (1993); Cohen et al., Meth. Enzymol. 217:618-644 (1993); Cline, Pharmac. Ther. 29:69-92m (1985) and may be used in accordance with the present invention, provided that the necessary developmental and physiological functions of the recipient cells are not disrupted. The technique should provide for the stable transfer of the nucleic acid to the cell, so that the nucleic acid is expressible by the cell and preferably heritable and expressible by its cell progeny.

[0288] The resulting recombinant cells can be delivered to a patient by various methods known in the art. Recombinant blood cells (e.g., hematopoietic stem or progenitor cells) are preferably administered intravenously. The amount of cells envisioned for use depends on the desired effect, patient state, etc., and can be determined by one skilled in the art.

[0289] Cells into which a nucleic acid can be introduced for purposes of gene therapy encompass any desired, available cell type, and include but are not limited to epithelial cells, endothelial cells, keratinocytes, fibroblasts, muscle cells, hepatocytes; blood cells such as T lymphocytes, B lymphocytes, monocytes, macrophages, neutrophils, eosinophils, megakaryocytes, granulocytes; various stem or progenitor cells, in particular hematopoietic stem or progenitor cells, e.g., as obtained from bone marrow, umbilical cord blood, peripheral blood, fetal liver, etc.

[0290] In a preferred embodiment, the cell used for gene therapy is autologous to the patient.

[0291] In an embodiment in which recombinant cells are used in gene therapy, nucleic acid sequences encoding an antibody are introduced into the cells such that they are expressible by the cells or their progeny, and the recombinant cells are then administered in vivo for therapeutic effect. In a specific embodiment, stem or progenitor cells are used. Any stem and/or progenitor cells which can be isolated and maintained in vitro can potentially be used in accordance with this embodiment of the present invention (see e.g. PCT Publication WO 94/08598; Stemple and Anderson, Cell 71:973-985 (1992); Rheinwald, Meth. Cell Bio. 21A:229 (1980); and Pittelkow and Scott, Mayo Clinic Proc. 61:771 (1986)).

[0292] In a specific embodiment, the nucleic acid to be introduced for purposes of gene therapy comprises an inducible promoter operably linked to the coding region, such that expression of the nucleic acid is controllable by the presence or absence of an appropriate inducer of transcription.

### Demonstration of Therapeutic or Prophylactic Activity

[0293] The compounds or pharmaceutical compositions of the invention are preferably tested in vitro, and then in vivo for the desired therapeutic or prophylactic activity, prior to use in humans. For example, in vitro assays to demonstrate the therapeutic or prophylactic utility of a compound or pharmaceutical composition include, the effect of a compound on a cell line or a patient tissue sample. The effect of the compound or composition on the cell line and/or tissue sample can be determined utilizing techniques known to those of skill in the art including, but not limited to, rosette formation assays and cell lysis assays. In accordance with the invention, in vitro assays which can be used to determine whether administration of a specific compound is indicated, include in vitro cell culture assays in which a patient tissue sample is grown in culture, and exposed to or otherwise administered a compound, and the effect of such compound upon the tissue sample is observed.

### Therapeutic/Prophylactic Administration and Composition

[0294] The invention provides methods of treatment, inhibition and prophylaxis by administration to a subject of an effective amount of a compound or pharmaceutical composition of the invention, preferably a polypeptide or antibody of the invention. In a preferred embodiment, the compound is substantially purified (e.g., substantially free from substances that limit its effect or produce undesired side-effects). The subject is preferably an animal, including but not limited to animals such as cows, pigs, horses, chickens, cats, dogs, etc., and is preferably a mammal, and most preferably human.

[0295] Formulations and methods of administration that can be employed when the compound comprises a nucleic acid or an immunoglobulin are described above; additional appropriate formulations and routes of administration can be selected from among those described herein below.

[0296] Various delivery systems are known and can be used to administer a compound of the invention, e.g., encapsulation in liposomes, microparticles, microcapsules, recombinant cells capable of expressing the compound, receptor-mediated endocytosis (see, e.g., Wu and Wu, J. Biol. Chem. 262:4429-4432 (1987)), construction of a nucleic acid as part of a retroviral or other vector, etc. Methods of introduction include but are not limited to intradermal, intramuscular, intraperitoneal, intravenous, subcutaneous, intranasal, epidural, and oral routes. The compounds or compositions may be administered by any convenient route, for example by infusion or bolus injection, by absorption through epithelial or mucocutaneous linings (e.g., oral mucosa, rectal and intestinal mucosa, etc.) and may be administered together with other biologically active agents. Administration can be systemic or local. In addition, it may be desirable to introduce the pharmaceutical compounds or compositions of the invention into the central nervous system by any suitable route, including intraventricular and intrathecal injection; intraventricular injection may be facilitated by an intraventricular catheter, for example, attached to a reservoir, such as an Ommaya reservoir. Pulmonary administration can also be employed, e.g., by use of an inhaler or nebulizer, and formulation with an aerosolizing agent.

[0297] In a specific embodiment, it may be desirable to administer the pharmaceutical compounds or compositions of the invention locally to the area in need of treatment; this may be achieved by, for example, and not by way of limitation, local infusion during surgery, topical application, e.g., in conjunction with a wound dressing after surgery, by injection, by means of a catheter, by means of a suppository, or by means of an implant, said implant being of a porous, non-porous, or gelatinous material, including membranes, such as sialastic membranes, or fibers. Preferably, when administering a protein, including an antibody, of the invention, care must be taken to use materials to which the protein does not absorb.

[0298] In another embodiment, the compound or composition can be delivered in a vesicle, in particular a liposome (see Langer, Science 249:1527-j533 (1990); Treat et al., in Liposomes in the Therapy of Infectious Disease and Cancer, Lopez-Berestein and Fidler (eds.), Liss, New York, pp. 353-365 (1989); Lopez-Berestein, ibid., pp. 317-327; see generally ibid.)

[0299] In yet another embodiment, the compound or composition can be delivered in a controlled release system. In one embodiment, a pump may be used (see Langer, supra; Sefton, CRC Crit. Ref. Biomed. Eng. 14:201 (1987); Buchwald et al., Surgery 88:507 (1980); Saudek et al., N. Engl. J. Med. 321:574 (1989)). In another embodiment, polymeric materials can be used (see Medical Applications of Controlled Release, Langer and Wise (eds.), CRC Pres., Boca Raton, Fla. (1974); Controlled Drug Bioavailability, Drug Product Design and Performance, Smolen and Ball (eds.), Wiley, New York (1984); Ranger and Peppas, J., Macromol. Sci. Rev. Macromol. Chem. 23:61 (1983); see also Levy et al., Science 228: 190 (1985); During et al., Ann. Neurol. 25:351 (1989); Howard et al., J. Neurosurg. 71:105 (1989)). In yet another embodiment, a controlled release system can be placed in proximity of the therapeutic target, e.g., the brain, thus requiring only a fraction of the systemic dose (see, e.g., Goodson, in Medical Applications of Controlled Release, supra, vol. 2, pp. 115-138 (1984)).

[0300] Other controlled release systems are discussed in the review by Langer (Science 249:1527-1533 (1990)).

[0301] In a specific embodiment where the compound of the invention is a nucleic acid encoding a protein, the nucleic acid can be administered in vivo to promote expression of its encoded protein, by constructing it as part of an appropriate nucleic acid expression vector and administering it so that it becomes intracellular, e.g., by use of a retroviral vector (see U.S. Pat. No. 4,980,286), or by direct injection, or by use of microparticle bombardment (e.g., a gene gun; Biolistic, Dupont), or coating with lipids or cell-surface receptors or transfecting agents, or by administering it in linkage to a homeobox-like peptide which is known to enter the nucleus (see e.g., Joliot et al., Proc. Natl. Acad. Sci. USA 88:1864-1868 (1991)), etc. Alternatively, a nucleic acid can be introduced intracellularly and incorporated within host cell DNA for expression, by homologous recombination.

[0302] The present invention also provides pharmaceutical compositions. Such compositions comprise a therapeutically effective amount of a compound, and a pharmaceutically acceptable carrier. In a specific embodiment, the term “pharmaceutically acceptable” means approved by a regulatory agency of the Federal or a state government or listed in the U.S. Pharmacopeia or other generally recognized pharmacopeia for use in animals, and more particularly in humans. The term “carrier” refers to a diluent, adjuvant, excipient, or vehicle with which the therapeutic is administered. Such pharmaceutical carriers can be sterile liquids, such as water and oils, including those of petroleum, animal, vegetable or synthetic origin, such as peanut oil, soybean oil, mineral oil, sesame oil and the like. Water is a preferred carrier when the pharmaceutical composition is administered intravenously. Saline solutions and aqueous dextrose and glycerol solutions can also be employed as liquid carriers, particularly for injectable solutions. Suitable pharmaceutical excipients include starch, glucose, lactose, sucrose, gelatin, malt, rice, flour, chalk, silica gel, sodium stearate, glycerol monostearate, talc, sodium chloride, dried skim milk, glycerol, propylene, glycol, water, ethanol and the like. The composition, if desired, can also contain minor amounts of wetting or emulsifying agents, or pH buffering agents. These compositions can take the form of solutions, suspensions, emulsion, tablets, pills, capsules, powders, sustained-release formulations and the like. The composition can be formulated as a suppository, with traditional binders and carriers such as triglycerides. Oral formulation can include standard carriers such as pharmaceutical grades of mannitol, lactose, starch, magnesium stearate, sodium saccharine, cellulose, magnesium carbonate, etc. Examples of suitable pharmaceutical carriers are described in “Remington's Pharmaceutical Sciences” by E. W. Martin. Such compositions will contain a therapeutically effective amount of the compound, preferably in purified form, together with a suitable amount of carrier so as to provide the form for proper administration to the patient. The formulation should suit the mode of administration.

[0303] In a preferred embodiment, the composition is formulated in accordance with routine procedures as a pharmaceutical composition adapted for intravenous administration to human beings. Typically, compositions for intravenous administration are solutions in sterile isotonic aqueous buffer. Where necessary, the composition may also include a solubilizing agent and a local anesthetic such as lignocaine to ease pain at the site of the injection. Generally, the ingredients are supplied either separately or mixed together in unit dosage form, for example, as a dry lyophilized powder or water free concentrate in a hermetically sealed container such as an ampoule or sachette indicating the quantity of active agent. Where the composition is to be administered by infusion, it can be dispensed with an infusion bottle containing sterile pharmaceutical grade water or saline. Where the composition is administered by injection, an ampoule of sterile water for injection or saline can be provided so that the ingredients may be mixed prior to administration.

[0304] The compounds of the invention can be formulated as neutral or salt forms. Pharmaceutically acceptable salts include those formed with anions such as those derived from hydrochloric, phosphoric, acetic, oxalic, tartaric acids, etc., and those formed with cations such as those derived from sodium, potassium, ammonium, calcium, ferric hydroxides, isopropylamine, triethylamine, 2-ethylamino ethanol, histidine, procaine, etc.

[0305] The amount of the compound of the invention, which will be effective in the treatment, inhibition and prevention of a disease or disorder associated with aberrant expression and/or activity of a polypeptide of the invention can be determined by standard clinical techniques. In addition, in vitro assays may optionally be employed to help identify optimal dosage ranges. The precise dose to be employed in the formulation will also depend on the route of administration, and the seriousness of the disease or disorder, and should be decided according to the judgment of the practitioner and each patient's circumstances. Effective doses may be extrapolated from dose-response curves derived from in vitro or animal model test systems.

[0306] For antibodies, the dosage administered to a patient is typically 0.1 mg/kg to 100 mg/kg of the patient's body weight. Preferably, the dosage administered to a patient is between 0.1 mg/kg and 20 mg/kg of the patient's body weight, more preferably 1 mg/kg to 10 mg/kg of the patient's body weight. Generally, human antibodies have a longer half-life within the human body than antibodies from other species due to the immune response to the foreign polypeptides. Thus, lower dosages of human antibodies and less frequent administration is often possible. Further, the dosage and frequency of administration of antibodies of the invention may be reduced by enhancing uptake and tissue penetration (e.g., into the brain) of the antibodies by modifications such as, for example, lipidation.

[0307] The invention also provides a pharmaceutical pack or kit comprising one or more containers filled with one or more of the ingredients of the pharmaceutical compositions of the invention. Optionally associated with such container(s) can be a notice in the form prescribed by a governmental agency regulating the manufacture, use or sale of pharmaceuticals or biological products, which notice reflects approval by the agency of manufacture, use or sale for human administration.

### Diagnosis and Imaging

[0308] Labeled antibodies, and derivatives and analogs thereof, which specifically bind to a polypeptide of interest can be used for diagnostic purposes to detect, diagnose, or monitor diseases, disorders, and/or conditions associated with the aberrant expression and/or activity of a polypeptide of the invention. The invention provides for the detection of aberrant expression of a polypeptide of interest, comprising (a) assaying the expression of the polypeptide of interest in cells or body fluid of an individual using one or more antibodies specific to the polypeptide interest and (b) comparing the level of gene expression with a standard gene expression level, whereby an increase or decrease in the assayed polypeptide gene expression level compared to the standard expression level is indicative of aberrant expression.

[0309] The invention provides a diagnostic assay for diagnosing a prostate disorder, comprising (a) assaying the expression of the polypeptide of interest in cells or body fluid of an individual using one or more antibodies specific to the polypeptide interest and (b) comparing the level of gene expression with a standard gene expression level, whereby an increase or decrease in the assayed polypeptide gene expression level compared to the standard expression level is indicative of a particular disorder. With respect to cancer, the presence of a relatively high amount of transcript in biopsied tissue from an individual may indicate a predisposition for the development of the disease, or may provide a means for detecting the disease prior to the appearance of actual clinical symptoms. A more definitive diagnosis of this type may allow health professionals to employ preventative measures or aggressive treatment earlier thereby preventing the development or further progression of the cancer.

[0310] Antibodies of the invention can be used to assay protein levels in a biological sample using classical immunohistological methods known to those of skill in the art (e.g., see Jalkanen et al., J. Cell. Biol. 101:976-985 (1985); Jalkanen et al., J. Cell . Biol. 105:3087-3096 (1987)). Other antibody-based methods useful for detecting protein gene expression include immunoassays, such as the enzyme linked immunosorbent assay (ELISA) and the radioimmunoassay (RIA). Suitable antibody assay labels are known in the art and include enzyme labels, such as, glucose oxidase; radioisotopes, such as iodine (1251, 1211), carbon (14C), sulfur (35S), tritium (3H), indium (112In), and technetium (99Tc); luminescent labels, such as luminol; and fluorescent labels, such as fluorescein and rhodamine, and biotin.

[0311] One facet of the invention is the detection and diagnosis of a disease or disorder associated with aberrant expression of a polypeptide of interest in an animal, preferably a mammal and most preferably a human. A preferred embodiment of the invention is the detection and diagnosis of a disease or disorder of the prostate associated with aberrant expression of a prostate cancer antigen in an animal, preferably a mammal and most preferably a human. In one embodiment, diagnosis comprises: a) administering (for example, parenterally, subcutaneously, or intraperitoneally) to a subject an effective amount of a labeled molecule which specifically binds to the polypeptide of interest; b) waiting for a time interval following the administering for permitting the labeled molecule to preferentially concentrate at sites in the subject where the polypeptide is expressed (and for unbound labeled molecule to be cleared to background level); c) determining background level; and d) detecting the labeled molecule in the subject, such that detection of labeled molecule above the background level indicates that the subject has a particular disease or disorder associated with aberrant expression of the polypeptide of interest. Background level can be determined by various methods including, comparing the amount of labeled molecule detected to a standard value previously determined for a particular system.

[0312] It will be understood in the art that the size of the subject and the imaging system used will determine the quantity of imaging moiety needed to produce diagnostic images. In the case of a radioisotope moiety, for a human subject, the quantity of radioactivity injected will normally range from about 5 to 20 millicuries of 99mTc. The labeled antibody or antibody fragment will then preferentially accumulate at the location of cells which contain the specific protein. In vivo tumor imaging is described in S. W. Burchiel et al., “Immunopharmacokinetics of Radiolabeled Antibodies and Their Fragments.” (Chapter 13 in Tumor Imaging: The Radiochemical Detection of Cancer, S. W. Burchiel and B. A. Rhodes, eds., Masson Publishing Inc. (1982)).

[0313] Depending on several variables, including the type of label used and the mode of administration, the time interval following the administration for permitting the labeled molecule to preferentially concentrate at sites in the subject and for unbound labeled molecule to be cleared to background level is 6 to 48 hours or 6 to 24 hours or 6 to 12 hours. In another embodiment the time interval following administration is 5 to 20 days or 5 to 10 days.

[0314] In an embodiment, monitoring of the disease or disorder is carried out by repeating the method for diagnosing the disease or disorder, for example, one month after initial diagnosis, six months after initial diagnosis, one year after initial diagnosis, etc.

[0315] Presence of the labeled molecule can be detected in the patient using methods known in the art for in vivo scanning. These methods depend upon the type of label used. Skilled artisans will be able to determine the appropriate method for detecting a particular label. Methods and devices that may be used in the diagnostic methods of the invention include, but are not limited to, computed tomography (CT), whole body scan such as position emission tomography (PET), magnetic resonance imaging (MRI), and sonography.

[0316] In a specific embodiment, the molecule is labeled with a radioisotope and is detected in the patient using a radiation responsive surgical instrument (Thurston et al., U.S. Pat. No. 5,441,050). In another embodiment, the molecule is labeled with a fluorescent compound and is detected in the patient using a fluorescence responsive scanning instrument. In another embodiment, the molecule is labeled with a positron emitting metal and is detected in the patent using positron emission-tomography. In yet another embodiment, the molecule is labeled with a paramagnetic label and is detected in a patient using magnetic resonance imaging (MRI).

### Kits

[0317] The present invention provides kits that can be used in the above methods. In one embodiment, a kit comprises an antibody of the invention, preferably a purified antibody, in one or more containers. In a specific embodiment, the kits of the present invention contain a substantially isolated polypeptide comprising an epitope which is specifically immunoreactive with an antibody included in the kit. Preferably, the kits of the present invention further comprise a control antibody which does not react with the polypeptide of interest. In another specific embodiment, the kits of the present invention contain a means for detecting the binding of an antibody to a polypeptide of interest (e.g., the antibody may be conjugated to a detectable substrate such as a fluorescent compound, an enzymatic substrate, a radioactive compound or a luminescent compound, or a second antibody which recognizes the first antibody may be conjugated to a detectable substrate).

[0318] In another specific embodiment of the present invention, the kit is a diagnostic kit for use in screening serum containing antibodies specific against proliferative and/or cancerous polynucleotides and polypeptides. Such a kit may include a control antibody that does not react with the polypeptide of interest. Such a kit may include a substantially isolated polypeptide antigen comprising an epitope, which is specifically immunoreactive with at least one anti-polypeptide antigen antibody. Further, such a kit includes means for detecting the binding of said antibody to the antigen (e.g., the antibody may be conjugated to a fluorescent compound such as fluorescein or rhodamine, which can be detected by flow cytometry). In specific embodiments, the kit may include a recombinantly produced or chemically synthesized polypeptide antigen. The polypeptide antigen of the kit may also be attached to a solid support.

[0319] In a more specific embodiment the detecting means of the above-described kit includes a solid support to which said polypeptide antigen is attached. Such a kit may also include a non-attached reporter-labeled anti-human antibody. In this embodiment, binding of the antibody to the polypeptide antigen can be detected by binding of the said reporter-labeled antibody.

[0320] In an additional embodiment, the invention includes a diagnostic kit for use in screening serum containing antigens of the polypeptide of the invention. The diagnostic kit includes a substantially isolated antibody specifically immunoreactive with polypeptide or polynucleotide antigens, and means for detecting the binding of the polynucleotide or polypeptide antigen to the antibody. In one embodiment, the antibody is attached to a solid support. In a specific embodiment, the antibody may be a monoclonal antibody. The detecting means of the kit may include a second, labeled monoclonal antibody. Alternatively, or in addition, the detecting means may include a labeled, competing antigen.

[0321] In one diagnostic configuration, test serum is reacted with a solid phase reagent having a surface-bound antigen obtained by the methods of the present invention. After binding with specific antigen antibody to the reagent and removing unbound serum components by washing, the reagent is reacted with reporter-labeled anti-human antibody to bind reporter to the reagent in proportion to the amount of bound anti-antigen antibody on the solid support. The reagent is again washed to remove unbound labeled antibody, and the amount of reporter associated with the reagent is determined. Typically, the reporter is an enzyme, which is detected by incubating the solid phase in the presence of a suitable fluorometric, luminescent or colorimetric substrate (Sigma, St. Louis, Mo.).

[0322] The solid surface reagent in the above assay is prepared by known techniques for attaching protein material to solid support material, such as polymeric beads, dip sticks, 96-well plate or filter material. These attachment methods generally include non-specific adsorption of the protein to the support or covalent attachment of the protein, typically through a free amine group, to a chemically reactive group on the solid support, such as an activated carboxyl, hydroxyl, or aldehyde group. Alternatively, streptavidin coated plates can be used in conjunction with biotinylated antigen(s).

[0323] Thus, the invention provides an assay system or kit for carrying out this diagnostic method. The kit generally includes a support with surface-bound recombinant antigens, and a reporter-labeled anti-human antibody for detecting surface-bound anti-antigen antibody.

### Uses of the Polynucleotides

[0324] Each of the polynucleotides identified herein can be used in numerous ways as reagents. The following description should be considered exemplary and utilizes known techniques.

[0325] The polynucleotides of the present invention are useful for chromosome identification. There exists an ongoing need to identify new chromosome markers, since few chromosome marking reagents, based on actual sequence data (repeat polymorphisms), are presently available. Each sequence is specifically targeted to and can hybridize with a particular location on an individual human chromosome, thus each polynucleotide of the present invention can routinely be used as a chromosome marker using techniques known in the art. Table 1A, column 8 provides the chromosome location of some of the polynucleotides of the invention.

[0326] Briefly, sequences can be mapped to chromosomes by preparing PCR primers (preferably at least 15 bp (e.g., 15-25 bp) from the sequences shown in SEQ ID NO:X. Primers can optionally be selected using computer analysis so that primers do not span more than one predicted exon in the genomic DNA. These primers are then used for PCR screening of somatic cell hybrids containing individual human chromosomes. Only those hybrids containing the human gene corresponding to SEQ ID NO:X will yield an amplified fragment.

[0327] Similarly, somatic hybrids provide a rapid method of PCR mapping the polynucleotides to particular chromosomes. Three or more clones can be assigned per day using a single thermal cycler. Moreover, sublocalization of the polynucleotides can be achieved with panels of specific chromosome fragments. Other gene mapping strategies that can be used include in situ hybridization, prescreening with labeled flow-sorted chromosomes, preselection by hybridization to construct chromosome specific-cDNA libraries, and computer mapping techniques (See, e.g., Shuler, Trends Biotechnol 16:456-459 (1998) which is hereby incorporated by reference in its entirety).

[0328] Precise chromosomal location of the polynucleotides can also be achieved using fluorescence in situ hybridization (FISH) of a metaphase chromosomal spread. This technique uses polynucleotides as short as 500 or 600 bases; however, polynucleotides 2,000-4,000 bp are preferred. For a review of this technique, see Verma et al., “Human Chromosomes: a Manual of Basic Techniques,” Pergamon Press, New York (1988).

[0329] For chromosome mapping, the polynucleotides can be used individually (to mark a single chromosome or a single site on that chromosome) or in panels (for marking multiple sites and/or multiple chromosomes).

[0330] Thus, the present invention also provides a method for chromosomal localization which involves (a) preparing PCR primers from the polynucleotide sequences in Table 1A and/or Table 2 and SEQ ID NO:X and (b) screening somatic cell hybrids containing individual chromosomes.

[0331] The polynucleotides of the present invention would likewise be useful for radiation hybrid mapping, HAPPY mapping, and long range restriction mapping. For a review of these techniques and others known in the art, see, e.g. Dear, “Genome Mapping: A Practical Approach,” IRL Press at Oxford University Press, London (1997); Aydin, J. Mol. Med. 77:691-694 (1999); Hacia et al., Mol. Psychiatry 3:483-492 (1998); Herrick et al., Chromosome Res. 7:409-423 (1999); Hamilton et al., Methods Cell Biol. 62:265-280 (2000); and/or Ott, J. Hered. 90:6&-70 (1999), each of which is hereby incorporated by reference in its entirety.

[0332] Once a polynucleotide has been mapped to a precise chromosomal location, the physical position of the polynucleotide can be used in linkage analysis. Linkage analysis establishes coinheritance between a chromosomal location and presentation of a particular disease. (Disease mapping data are found, for example, in V. McKusick, Mendelian Inheritance in Man (available on line through Johns Hopkins University Welch Medical Library).) Column 9 of Table 1A provides an OMIM reference identification number of diseases associated with the cytologic band disclosed in column 8 of Table 1A, as determined using techniques described herein and by reference to Table 5. Assuming 1 megabase mapping resolution and one gene per 20 kb, a cDNA precisely localized to a chromosomal region associated with the disease could be one of 50-500 potential causative genes.

[0333] Thus, once coinheritance is established, differences in a polynucleotide of the invention and the corresponding gene between affected and unaffected individuals can be examined. First, visible structural alterations in the chromosomes, such as deletions or translocations, are examined in chromosome spreads or by PCR. If no structural alterations exist, the presence of point mutations are ascertained. Mutations observed in some or all affected individuals, but not in normal individuals, indicate that the mutation may cause the disease. However, complete sequencing of the polypeptide and the corresponding gene from several normal individuals is required to distinguish the mutation from a polymorphism. If a new polymorphism is identified, this polymorphic polypeptide can be used for further linkage analysis.

[0334] Furthermore, increased or decreased expression of the gene in affected individuals as compared to unaffected individuals can be assessed using the polynucleotides of the invention. Any of these alterations (altered expression, chromosomal rearrangement, or mutation) can be used as a diagnostic or prognostic marker. Diagnostic and prognostic methods, kits and reagents encompassed by the present invention are briefly described below and more thoroughly elsewhere herein (see e.g., the sections labeled “Antibodies”, “Diagnostic Assays”, and “Methods for Detecting Prostate Diseases, Including Cancer”).

[0335] Thus, the invention also provides a diagnostic method useful during diagnosis of a disorder, involving measuring the expression level of polynucleotides of the present invention in cells or body fluid from an individual and comparing the measured gene expression level with a standard level of polynucleotide expression level, whereby an increase or decrease in the gene expression level compared to the standard is indicative of a disorder. Additional non-limiting examples of diagnostic methods encompassed by the present invention are more thoroughly described elsewhere herein (see, e.g., Example 12).

[0336] In still another embodiment, the invention includes a kit for analyzing samples for the presence of proliferative and/or cancerous polynucleotides derived from a test subject, as further described herein. In a general embodiment, the kit includes at least one polynucleotide probe containing a nucleotide sequence that will specifically hybridize with a polynucleotide of the invention and a suitable container. In a specific embodiment, the kit includes two polynucleotide probes defining an internal region of the polynucleotide of the invention, where each probe has one strand containing a 31′mer-end internal to the region. In a further embodiment, the probes may be useful as primers for polymerase chain reaction amplification.

[0337] Where a diagnosis of a related disorder, including, for example, diagnosis of a tumor, has already been made according to conventional methods, the present invention is useful as a prognostic indicator, whereby patients exhibiting enhanced or depressed polynucleotide of the invention expression will experience a worse clinical outcome relative to patients expressing the gene at a level nearer the standard level.

[0338] By “measuring the expression level of polynucleotides of the invention” is intended qualitatively or quantitatively measuring or estimating the level of the polypeptide of the invention or the level of the mRNA encoding the polypeptide of the invention in a first biological sample either directly (e.g., by determining or estimating absolute protein level or mRNA level) or relatively (e.g., by comparing to the polypeptide level or mRNA level in a second biological sample). Preferably, the polypeptide level or mRNA level in the first biological sample is measured or estimated and compared to a standard polypeptide level or mRNA level, the standard being taken from a second biological sample obtained from an individual not having the related disorder or being determined by averaging levels from a population of individuals not having a related disorder. As will be appreciated in the art, once a standard polypeptide level or mRNA level is known, it can be used repeatedly as a standard for comparison.

[0339] By “biological sample” is intended any biological sample obtained from an individual, body fluid, cell line, tissue culture, or other source which contains polypeptide of the present invention or the corresponding mRNA. As indicated, biological samples include body fluids (such as semen, lymph, vaginal pool, sera, plasma, urine, synovial fluid and spinal fluid) which contain the polypeptide of the present invention, and tissue sources found to express the polypeptide of the present invention. Methods for obtaining tissue biopsies and body fluids from mammals are well known in the art. Where the biological sample is to include mRNA, a tissue biopsy is the preferred source.

[0340] The method(s) provided above may preferably be applied in a diagnostic method and/or kits in which polynucleotides and/or polypeptides of the invention are attached to a solid support. In one exemplary method, the support may be a “gene chip” or a “biological chip” as described in U.S. Pat. Nos. 5,837,832, 5,874,219, and 5,856,174. Further, such a gene chip with polynucleotides of the invention attached may be used to identify polymorphisms between the isolated polynucleotide sequences of the invention, with polynucleotides isolated from a test subject. The knowledge of such polymorphisms (i.e., their location, as well as, their existence) would be beneficial in identifying disease loci for many disorders, such as for example, in neural disorders, immune system disorders, muscular disorders, reproductive disorders, gastrointestinal disorders, pulmonary disorders, digestive disorders, cardiovascular disorders, renal disorders, proliferative disorders, and/or cancerous diseases and conditions. Such a method is described in U.S. Pat. Nos. 5,858,659 and 5,856,104. The U.S. Patents referenced supra are hereby incorporated by reference in their entirety herein.

[0341] The present invention encompasses polynucleotides of the present invention that are chemically synthesized, or reproduced as peptide nucleic acids (PNA), or according to other methods known in the art. The use of PNAs would serve as the preferred form if the polynucleotides of the invention are incorporated onto a solid support, or gene chip. For the purposes of the present invention, a peptide nucleic acid (PNA) is a polyamide type of DNA analog and the monomeric units for adenine, guanine, thymine and cytosine are available commercially (Perceptive Biosystems). Certain components of DNA, such as phosphorus, phosphorus oxides, or deoxyribose derivatives, are not present in PNAs. As disclosed by Nielsen et al., Science 254:1497 (1991); and Egholm et al., Nature 365:666 (1993), PNAs bind specifically and tightly to complementary DNA strands and are not degraded by nucleases. In fact, PNA binds more strongly to DNA than DNA itself does. This is probably because there is no electrostatic repulsion between the two strands, and also the polyamide backbone is more flexible. Because of this, PNA/DNA duplexes bind under a wider range of stringency conditions than DNA/DNA duplexes, making it easier to perform multiplex hybridization. Smaller probes can be used than with DNA due to the strong binding. In addition, it is more likely that single base mismatches can be determined with PNA/DNA hybridization because a single mismatch in a PNA/DNA 15-mer lowers the melting point (T.sub.m) by 8°-20° C., vs. 4°-16° C. for the DNA/DNA 15-mer duplex. Also, the absence of charge groups in PNA means that hybridization can be done at low ionic strengths and reduce possible interference by salt during the analysis.

[0342] The compounds of the present invention have uses which include, but are not limited to, detecting cancer in mammals. In particular the invention is useful during diagnosis of pathological cell proliferative neoplasias which include, but are not limited to: acute myelogenous leukemias including acute monocytic leukemia, acute myeloblastic leukemia, acute promyelocytic leukemia, acute myelomonocytic leukemia, acute erythroleukemia, acute megakaryocytic leukemia, and acute undifferentiated leukemia, etc.; and chronic myelogenous leukemias including chronic myelomonocytic leukemia, chronic granulocytic leukemia, etc. Preferred mammals include monkeys, apes, cats, dogs, cows, pigs, horses, rabbits and humans. Particularly preferred are humans.

[0343] The compounds of the present invention have preferred uses which include, but are not limited to, detecting prostate cancer in mammals. In particular the invention is useful during diagnosis of pathological cell proliferative neoplasias, which include, but are not limited to: prostate cancers such as adenocarcinoma, transitional cell carcinomas, ductal carcinomas, and squamous cell carcinomas, and as described under “Hyperproliferative Disorders” and/or “Reproductive System Disorders” below. Preferred mammals include monkeys, apes, cats, dogs, cows, pigs, horses, rabbits and humans. Particularly preferred are humans.

[0344] Pathological cell proliferative disorders are often associated with inappropriate activation of proto-oncogenes. (Gelmann, E. P. et al., “The Etiology of Acute Leukemia: Molecular Genetics and Viral Oncology,” in Neoplastic Diseases of the Blood, Vol 1., Wiernik, P. H. et al. eds., 161-182 (1985)). Neoplasias are now believed to result from the qualitative alteration of a normal cellular gene product, or from the quantitative modification of gene expression by insertion into the chromosome of a viral sequence, by chromosomal translocation of a gene to a more actively transcribed region, or by some other mechanism. (Gelmann et al., supra) It is likely that mutated or altered expression of specific genes is involved in the pathogenesis of some leukemias, among other tissues and cell types. (Gelmann et al., supra) Indeed, the human counterparts of the oncogenes involved in some animal neoplasias have been amplified or translocated in some cases of human leukemia and carcinoma. (Gelmann et al., supra)

[0345] For example, c-myc expression is highly amplified in the non-lymphocytic leukemia cell line HL-60. When HL-60 cells are chemically induced to stop proliferation, the level of c-myc is found to be downregulated. (International Publication Number WO 91/15580). However, it has been shown that exposure of HL-60 cells to a DNA construct that is complementary to the 5′ end of c-myc or c-myb blocks translation of the corresponding mRNAs which downregulates expression of the c-myc or c-myb proteins and causes arrest of cell proliferation and differentiation of the treated cells. (International Publication Number WO 91/15580; Wickstrom et al., Proc. Natl. Acad. Sci. 85:1028 (1988); Anfossi et al., Proc. Natl. Acad. Sci. 86:3379 (1989)). However, the skilled artisan would appreciate the present invention's usefulness is not be limited to treatment, prevention, diagnosis and/or prognosis, of proliferative disorders of cells and tissues of hematopoietic origin, in light of the numerous cells and cell types of varying origins which are known to exhibit proliferative phenotypes. In preferred embodiments, the compounds and/or methods of the invention are used to treat, prevent, diagnose, and/or prognose, proliferative disorders of prostate cells and tissues.

[0346] In addition to the foregoing, a polynucleotide of the present invention can be used to control gene expression through triple helix formation or through antisense DNA or RNA. Antisense techniques are discussed, for example, in Okano, J. Neurochem. 56: 560 (1991); “Oligodeoxynucleotides as Antisense Inhibitors of Gene Expression, CRC Press, Boca Raton, Fla. (1988). Triple helix formation is discussed in, for instance Lee et al., Nucleic Acids Research 6: 3073 (1979); Cooney et al., Science 241: 456 (1988); and Dervan et al., Science 251: 1360 (1991). Both methods rely on binding of the polynucleotide to a complementary DNA or RNA. For these techniques, preferred polynucleotides are usually oligonucleotides 20 to 40 bases in length and complementary to either the region of the gene involved in transcription (triple helix—see Lee et al., Nucl. Acids Res. 6:3073 (1979); Cooney et al., Science 241:456 (1988); and Dervan et al., Science 251:1360 (1991)) or to the mRNA itself (antisense—Okano, J. Neurochem. 56:560 (1991); Oligodeoxy-nucleotides as Antisense Inhibitors of Gene Expression, CRC Press, Boca Raton, Fla. (1988).) Triple helix formation optimally results in a shut-off of RNA transcription from DNA, while antisense RNA hybridization blocks translation of an mRNA molecule into polypeptide. The oligonucleotide described above can also be delivered to cells such that the antisense RNA or DNA may be expressed in vivo to inhibit production of polypeptide of the present invention antigens. Both techniques are effective in model systems, and the information disclosed herein can be used to design antisense or triple helix polynucleotides in an effort to treat disease, and in particular, for the treatment of proliferative diseases and/or conditions. Non-limiting antisense and triple helix methods encompassed by the present invention are more thoroughly described elsewhere herein (see, e.g., the section labeled “Antisense and Ribozyme (Antagonists)”).

[0347] Polynucleotides of the present invention are also useful in gene therapy. One goal of gene therapy is to insert a normal gene into an organism having a defective gene, in an effort to correct the genetic defect. The polynucleotides disclosed in the present invention offer a means of targeting such genetic defects in a highly accurate manner. Another goal is to insert a new gene that was not present in the host genome, thereby producing a new trait in the host cell. Additional non-limiting examples of gene therapy methods encompassed by the present invention are more thoroughly described elsewhere herein (see, e.g., the sections labeled “Gene Therapy Methods” and Examples 16, 17 and 18).

[0348] The polynucleotides are also useful for identifying individuals from minute biological samples. The United States military, for example, is considering the use of restriction fragment length polymorphism (RFLP) for identification of its personnel. In this technique, an individual's genomic DNA is digested with one or more restriction enzymes, and probed on a Southern blot to yield unique bands for identifying personnel. This method does not suffer from the current limitations of “Dog Tags” which can be lost, switched, or stolen, making positive identification difficult. The polynucleotides of the present invention can be used as additional DNA markers for RFLP.

[0349] The polynucleotides of the present invention can also be used as an alternative to RFLP, by determining the actual base-by-base DNA sequence of selected portions of an individual's genome. These sequences can be used to prepare PCR primers for amplifying and isolating such selected DNA, which can then be sequenced. Using this technique, individuals can be identified be-cause each individual will have a unique set of DNA sequences. Once an unique ID database is established for an individual, positive identification of that individual, living or dead, can be made from extremely small tissue samples.

[0350] Forensic biology also benefits from using DNA-based identification techniques as disclosed herein. DNA sequences taken from very small biological samples such as tissues, e.g., hair or skin, or body fluids, e.g., blood, saliva, semen, synovial fluid, amniotic fluid, breast milk, lymph, pulmonary sputum or surfactant, urine, fecal matter, etc., can be amplified using PCR. In one prior art technique, gene sequences amplified from polymorphic loci, such as DQa class II HLA gene, are used in forensic biology to identify individuals. (Erlich, H., PCR Technology, Freeman and Co. (1992).) Once these specific polymorphic loci are amplified, they are digested with one or more restriction enzymes, yielding an identifying set of bands on a Southern blot probed with DNA corresponding to the DQa class II HLA gene. Similarly, polynucleotides of the present invention can be used as polymorphic markers for forensic purposes.

[0351] There is also a need for reagents capable of identifying the source of a particular tissue. Such need arises, for example, in forensics when presented with tissue of unknown origin. Appropriate reagents can comprise, for example, DNA probes or primers prepared from the sequences of the present invention, specific to tissues, including but not limited to, those sequences referred to in Table 1A. Panels of such reagents can identify tissue by species and/or by organ type. In a similar fashion, these reagents can be used to screen tissue cultures for contamination. Additional non-limiting examples of such uses are further described herein.

[0352] Because prostate cancer antigens are found expressed in the prostate, the polynucleotides of the present invention are also useful as hybridization probes for differential identification of the tissue(s) or cell type(s) present in a biological sample. Similarly, polypeptides and antibodies directed to polypeptides of the present invention are useful to provide immunological probes for differential identification of the tissue(s) (e.g., immunohistochemistry assays) or cell type(s) (e.g., immunocytochemistry assays). In a specific embodiment, the polynucleotides of the present invention are also useful as hybridization probes for differential identification of prostate cancer tissue(s) or cell type(s) present in a biological sample. Similarly, polypeptides and antibodies directed to polypeptides of the present invention are useful to provide immunological probes for differential identification of prostate cancer tissue(s) (e.g., immunohistochemistry assays) or cell type(s) (e.g., immunocytochemistry assays). In addition, for a number of disorders of the above tissues or cells, significantly higher or lower levels of gene expression of the polynucleotides/polypeptides of the present invention may be detected in certain tissues (e.g., tissues expressing polypeptides and/or polynucleotides of the present invention, for example, normal prostate or diseased prostate tissues, and/or those tissues/cells corresponding to the library source relating to a polynucleotide sequence of the invention as disclosed in column 7 of Table 1A, and/or cancerous and/or wounded tissues) or bodily fluids (e.g., semen, lymph, vaginal pool, serum, plasma, urine, synovial fluid or spinal fluid) taken from an individual having such a disorder, relative to a “standard” gene expression level, i.e., the expression level in healthy tissue from an individual not having the disorder.

[0353] Thus, the invention provides a diagnostic method of a disorder, which involves: (a) assaying gene expression level in cells or body fluid of an individual; (b) comparing the gene expression level with a standard gene expression level, whereby an increase or decrease in the assayed gene expression level compared to the standard expression level is indicative of a disorder.

[0354] In the very least, the polynucleotides of the present invention can be used as molecular weight markers on Southern gels, as diagnostic probes for the presence of a specific mRNA in a particular cell type, as a probe to “subtract-out” known sequences in the process of discovering novel polynucleotides, for selecting and making oligomers for attachment to a “gene chip” or other support, to raise anti-DNA antibodies using DNA immunization techniques, and as an antigen to elicit an immune response.

### Uses of the Polypeptides

[0355] Each of the polypeptides identified herein can be used in numerous ways. The following description should be considered exemplary and utilizes known techniques.

[0356] Polypeptides and antibodies directed to polypeptides of the present invention are useful to provide immunological probes for differential identification of the tissue(s) (e.g., immunohistochemistry assays such as, for example, ABC immunoperoxidase (Hsu et al., J. Histochem. Cytochem. 29:577-580 (1981)) or cell type(s) (e.g., immunocytochemistry assays).

[0357] Antibodies can be used to assay levels of polypeptides encoded by polynucleotides of the invention in a biological sample using classical immunohistological methods known to those of skill in the art (see, e.g., Jalkanen, et al., J. Cell. Biol. 101:976-985 (1985); Jalkanen, et al., J. Cell. Biol. 105:3087-3096 (1987)). Other antibody-based methods useful for detecting protein gene expression include immunoassays, such as the enzyme linked immunosorbent assay (ELISA) and the radioimmunoassay (RIA). Suitable antibody assay labels are known in the art and include enzyme labels, such as, glucose oxidase; radioisotopes, such as iodine (¹³¹I, ¹²⁵I, ¹²³I, ¹²¹I), carbon (¹⁴C), sulfur (³⁵S), tritium (³H), indium (^{115m}In, ^{113m}In, ¹¹²In, ¹¹¹In), and technetium (⁹⁹Tc, ^{99m}Tc), thallium (²⁰¹Ti), gallium (⁶⁸Ga, ⁶⁷Ga), palladium (¹⁰³Pd), molybdenum (⁹⁹Mo), xenon (¹³³Xe), fluorine (¹⁸F), ¹⁵³Sm, ¹⁷⁷Lu, ¹⁵⁹Gd, ¹⁴⁹Pm, ¹⁴⁰La, ¹⁷⁵Yb, ¹⁶⁶Ho, ⁹⁰Y ⁴⁷Sc ¹⁸⁶Re ¹⁸⁸Re ¹⁴²Pr, ¹⁰⁵Rh, ⁹⁷Ru; luminescent labels, such as luminol; and fluorescent labels, such as fluorescein and rhodamine, and biotin.

[0358] In addition to assaying levels of polypeptide of the present invention in a biological sample, proteins can also be detected in vivo by imaging. Antibody labels or markers for in vivo imaging of protein include those detectable by X-radiography, NMR or ESR. For X-radiography, suitable labels include radioisotopes such as barium or cesium, which emit detectable radiation but are not overtly harmful to the subject. Suitable markers for NMR and ESR include those with a detectable characteristic spin, such as deuterium, which may be incorporated into the antibody by labeling of nutrients for the relevant hybridoma.

[0359] A prostate cancer antigen-specific antibody or antibody fragment which has been labeled with an appropriate detectable imaging moiety, such as a radioisotope (for example, ¹³¹I, ¹¹²In, ^{99m}Tc, (¹³¹I, ¹²⁵I, ¹²³I, ¹²¹I), carbon (¹⁴C), sulfur (³⁵S), tritium (³H), indium (¹¹⁵In, ^{113m}In, ¹¹²In, ¹¹¹In), and technetium (⁹⁹Tc, ^{99m}Tc), thallium (²⁰¹Ti), gallium (⁶⁸Ga, ⁶⁷Ga), palladium (¹⁰³Pd), molybdenum (⁹⁹Mo), xenon (¹³³Xe), fluorine (18F, ¹⁵³Sm, ¹⁷⁷Lu, ¹⁵⁹Gd, ¹⁴⁹Pm, ¹⁴⁰La, ¹⁷⁵Yb, ¹⁶⁶Ho, ⁹⁰Y, ⁴⁷SC, ¹⁸⁶Re, ¹⁸⁸Re, ¹⁴²Pr, ¹⁰⁵Rh; ⁹⁷Ru), a radio-opaque substance, or a material detectable by nuclear magnetic resonance, is introduced (for example, parenterally, subcutaneously or intraperitoneally) into the mammal to be examined for a prostate disorder. It will be understood in the art that the size of the subject and the imaging system used will determine the quantity of imaging moiety needed to produce diagnostic images. In the case of a radioisotope moiety, for a human subject, the quantity of radioactivity injected will normally range from about 5 to 20 millicuries of ^{99m}Tc. The labeled antibody or antibody fragment will then preferentially accumulate at the location of cells which express the polypeptide encoded by a polynucleotide of the invention. In vivo tumor imaging is described in S. W. Burchiel et al., “Immunopharmacokinetics of Radiolabeled Antibodies and Their Fragments” (Chapter 13 in Tumor Imaging: The Radiochemical Detection of Cancer, S. W. Burchiel and B. A. Rhodes, eds., Masson Publishing Inc. (1982)).

[0360] In one embodiment, the invention provides a method for the specific delivery of compositions of the invention to cells by administering polypeptides of the invention (e.g., polypeptides encoded by polynucleotides of the invention and/or antibodies) that are associated with heterologous polypeptides or nucleic acids. In one example, the invention provides a method for delivering a therapeutic protein into the targeted cell. In another example, the invention provides a method for delivering a single stranded nucleic acid (e.g., antisense or ribozymes) or double stranded nucleic acid (e.g., DNA that can integrate into the cell's genome or replicate episomally and that can be transcribed) into the targeted cell.

[0361] In another embodiment, the invention provides a method for the specific destruction of cells (e.g., the destruction of tumor cells) by administering polypeptides of the invention in association with toxins or cytotoxic prodrugs.

[0362] In a preferred embodiment, the invention provides a method for the specific destruction of prostate cells (e.g., aberrant prostate cells, prostate neoplasm) by administering polypeptides of the invention (e.g., polypeptides encoded by polynucleotides of the invention and/or antibodies) in association with toxins or cytotoxic prodrugs. In another preferred embodiment the invention provides a method for the specific destruction of tissues/cells corresponding to the library source relating to a polynucleotide sequence of the invention as disclosed in column 7 of Table 1A by administering polypeptides of the invention in association with toxins or cytotoxic prodrugs.

[0363] By “toxin” is meant one or more compounds that bind and activate endogenous cytotoxic effector systems, radioisotopes, holotoxins, modified toxins, catalytic subunits of toxins, or any molecules or enzymes not normally present in or on the surface of a cell that under defined conditions cause the cell's death. Toxins that may be used according to the methods of the invention include, but are not limited to, radioisotopes known in the art, compounds such as, for example, antibodies (or complement fixing containing portions thereof) that bind an inherent or induced endogenous cytotoxic effector system, thymidine kinase, endonuclease, RNAse, alpha toxin, ricin, abrin, Pseudomonas exotoxin A, diphtheria toxin, saporin, momordin, gelonin, pokeweed antiviral protein, alpha-sarcin and cholera toxin. “Toxin” also includes a cytostatic or cytocidal agent, a therapeutic agent or a radioactive metal ion, e.g., alpha-emitters such as, for example, ²¹³Bi, or other radioisotopes such as, for example, ¹⁰³Pd, ¹³³Xe, ¹³¹I, ¹¹¹In, ⁶⁸Ge, ⁵⁷Co, ⁶⁵Zn, ⁸⁵Sr, ³²P, ³⁵S, ⁹⁰Y, ¹⁵³Sm, ¹⁵³Gd, ¹⁶⁹Yb, ⁵¹Cr, ⁵⁴Mn, ⁷⁵Se, ¹¹³Sn, ⁹⁰Yttrium, ¹¹⁷Tin, ¹⁸⁶Rhenium, ¹⁶⁶Holmium, and ¹⁸⁸Rhenium; luminescent labels, such as luminol; and fluorescent labels, such as fluorescein and rhodamine, and biotin.

[0364] In a specific embodiment, the invention provides a method for the specific destruction of cells (e.g., the destruction of tumor cells) by administering polypeptides of the invention or antibodies of the invention in association with the radioisotope ⁹⁰Y In another specific embodiment, the invention provides a method for the specific destruction of cells (e.g., the destruction of tumor cells) by administering polypeptides of the invention or antibodies of the invention in association with the radioisotope

[0365] ^{III}In. In a further specific embodiment, the invention provides a method for the specific destruction of cells (e.g., the destruction of tumor cells) by administering polypeptides of the invention or antibodies of the invention in association with the radioisotope ¹³¹I.

[0366] Techniques known in the art may be applied to label polypeptides of the invention (including antibodies). Such techniques include, but are not limited to, the use of bifunctional conjugating agents (see e.g., U.S. Pat. Nos. 5,756,065; 5,714,631; 5,696,239; 5,652,361; 5,505,931; 5,489,425; 5,435,990; 5,428,139; 5,342,604; 5,274,119; 4,994,560; and 5,808,003; the contents of each of which are hereby incorporated by reference in its entirety).

[0367] Thus, the invention provides a diagnostic method of a disorder, which involves (a) assaying the expression level of a polypeptide of the present invention in cells or body fluid of an individual; and (b) comparing the assayed polypeptide expression level with a standard polypeptide expression level, whereby an increase or decrease in the assayed polypeptide expression level compared to the standard expression level is indicative of a disorder. With respect to cancer, the presence of a relatively high amount of transcript in biopsied tissue from an individual may indicate a predisposition for the development of the disease, or may provide a means for detecting the disease prior to the appearance of actual clinical symptoms. A more definitive diagnosis of this type may allow health professionals to employ preventative measures or aggressive treatment earlier thereby preventing the development or further progression of the cancer.

[0368] Moreover, polypeptides of the present invention can be used to treat or prevent diseases or conditions of the prostate such as, for example, prostate cancers such as adenocarcinoma, transitional cell carcinomas, ductal carcinomas, and squamous cell carcinomas, and as described under “Hyperproliferative Disorders” and/or “Reproductive System Disorders” below. In preferred embodiments, polynucleotides expressed in a particular tissue type (see, e.g., Table 1A, column 7) are used to diagnose, detect, prevent, treat and/or prognose disorders associated with the tissue type. For example, patients can be administered a polypeptide of the present invention in an effort to replace absent or decreased levels of the polypeptide (e.g., insulin), to supplement absent or decreased levels of a different polypeptide (e.g., hemoglobin S for hemoglobin B, SOD, catalase, DNA repair proteins), to inhibit the activity of a polypeptide (e.g., an oncogene or tumor supressor), to activate the activity of a polypeptide (e.g., by binding to a receptor), to reduce the activity of a membrane bound receptor by competing with it for free ligand (e.g., soluble TNF receptors used in reducing inflammation), or to bring about a desired response (e.g., blood vessel growth inhibition, enhancement of the immune response to proliferative cells or tissues).

[0369] Similarly, antibodies directed to a polypeptide of the present invention can also be used to treat disease (as described supra, and elsewhere herein). For example, administration of an antibody directed to a polypeptide of the present invention can bind, and/or neutralize the polypeptide, and/or reduce overproduction of the polypeptide. Similarly, administration of an antibody can activate the polypeptide, such as by binding to a polypeptide bound to a membrane (receptor).

[0370] At the very least, the polypeptides of the present invention can be used as molecular weight markers on SDS-PAGE gels or on molecular sieve gel filtration columns using methods well known to those of skill in the art. Polypeptides can also be used to raise antibodies, which in turn are used to measure protein expression from a recombinant cell, as a way of assessing transformation of the host cell. Moreover, the polypeptides of the present invention can be used to test the biological activities described herein.

### Diagnostic Assays

[0371] The compounds of the present invention are useful for diagnosis, treatment, prevention and/or prognosis of various prostate-related disorders in mammals, preferably humans. Such disorders include, but are not limited to, prostate cancers such as adenocarcinoma, transitional cell carcinomas, ductal carcinomas, and squamous cell carcinomas, and as described under “Hyperproliferative Disorders” and/or “Reproductive System Disorders” below. In preferred embodiments, polynucleotides expressed in a particular tissue type (see, e.g., Table 1A, column 7) are used to diagnose, detect, prevent, treat and/or prognose disorders associated with the tissue type.

[0372] Prostate cancer antigens are expressed in the prostate. For a number of prostate-related disorders, substantially altered (increased or decreased) levels of prostate cancer antigen gene expression can be detected in prostate cancer tissue or other cells or bodily fluids (e.g., sera, plasma, urine, semen, synovial fluid or spinal fluid) taken from an individual having such a disorder, relative to a “standard” prostate cancer antigen gene expression level, that is, the prostate cancer antigen expression level in prostate tissues or bodily fluids from an individual not having the prostate disorder. Thus, the invention provides a diagnostic method useful during diagnosis of a prostate disorder, which involves measuring the expression level of the gene encoding the prostate cancer associated polypeptide in prostate tissue or other cells or body fluid from an individual and comparing the measured gene expression level with a standard prostate cancer antigens gene expression level, whereby an increase or decrease in the gene expression level(s) compared to the standard is indicative of an prostate disorder.

[0373] In specific embodiments, the invention provides a diagnostic method useful during diagnosis of a disorder of a normal or diseased tissue/cell source corresponding to column 7 of Table 1A, which involves measuring the expression level of the coding sequence of a polynucleotide sequence associated with this tissue/cell source as disclosed in Table 1A in the tissue/cell source or other cells or body fluid from an individual and comparing the expression level of the coding sequence with a standard expression level of the coding sequence of a polynucleotide sequence, whereby an increase or decrease in the gene expression level(s) compared to the standard is indicative of a disorder of a normal or diseased tissue/cell source corresponding to column 7 of Table 1A.

[0374] In particular, it is believed that certain tissues in mammals with cancer of cells or tissue of the prostate express significantly enhanced or reduced levels of normal or altered prostate cancer antigen expression and mRNA encoding the prostate cancer associated polypeptide when compared to a corresponding “standard” level. Further, it is believed that enhanced or depressed levels of the prostate cancer associated polypeptide can be detected in certain body fluids (e.g., sera, plasma, urine, and spinal fluid) or cells or tissue from mammals with such a cancer when compared to sera from mammals of the same species not having the cancer.

[0375] For example, as disclosed herein, prostate cancer associated polypeptides of the invention are expressed in the prostate. Accordingly, polynucleotides of the invention (e.g., polynucleotide sequences complementary to all or a portion of a prostate cancer antigen mRNA nucleotide sequence of SEQ ID NO:X, nucleotide sequence encoding SEQ ID NO:Y, nucleotide sequence encoding a polypeptide encoded by SEQ ID NO:X and/or a nucleotide sequence delineated by columns 8 and 9 of Table 2) and antibodies (and antibody fragments) directed against the polypeptides of the invention may be used to quantitate or qualitate concentrations of cells of the prostate cancer expressing prostate cancer antigens, preferably on their cell surfaces. These polynucleotides and antibodies additionally have diagnostic applications in detecting abnormalities in the level of prostate cancer antigens gene expression, or abnormalities in the structure and/or temporal, tissue, cellular, or subcellular location of prostate cancer antigens. These diagnostic assays may be performed in vivo or in vitro, such as, for example, on blood samples, biopsy tissue or autopsy tissue. In specific embodiments, polynucleotides and antibodies of the invention are used to quantitate or qualitate tissues/cells corresponding to the library source disclosed in column 7 of Table 1A expressing the corresponding prostate cancer sequence disclosed in the same row of Table 1A, preferably on their cell surface.

[0376] Thus, the invention provides a diagnostic method useful during diagnosis of a prostate disorder, including cancers, which involves measuring the expression level of the gene encoding the prostate cancer antigen polypeptide in prostate tissue or other cells or body fluid from an individual and comparing the measured gene expression level with a standard prostate cancer antigen gene expression level, whereby an increase or decrease in the gene expression level compared to the standard is indicative of a prostate disorder. In specific embodiments, polynucleotides and antibodies of the invention are used to quantitate or qualitate tissues/cells corresponding to the library source disclosed in column 7 of Table 1A expressing the corresponding prostate cancer sequence disclosed in the same row of Table 1A, preferably on their cell surface.

[0377] Where a diagnosis of a disorder in the prostate, including diagnosis of a tumor, has already been made according to conventional methods, the present invention is useful as a prognostic indicator, whereby patients exhibiting enhanced, or depressed prostate cancer antigen gene expression will experience a worse clinical outcome relative to patients expressing the gene at a level nearer the standard level.

[0378] By “assaying the expression level of the gene encoding the prostate cancer associated polypeptide” is intended qualitatively or quantitatively measuring or estimating the level of the prostate cancer antigen polypeptide or the level of the mRNA encoding the prostate cancer antigen polypeptide in a first biological sample either directly (e.g., by determining or estimating absolute protein level or mRNA level) or relatively (e.g., by comparing to the prostate cancer associated polypeptide level or mRNA level in a second biological sample). Preferably, the prostate cancer antigen polypeptide expression level or mRNA level in the first biological sample is measured or estimated and compared to a standard prostate cancer antigen polypeptide level or mRNA level, the standard being taken from a second biological sample obtained from an individual not having the disorder or being determined by averaging levels from a population of individuals not having a disorder of the prostate. As will be appreciated in the art, once a standard prostate cancer antigen polypeptide level or mRNA level is known, it can be used repeatedly as a standard for comparison.

[0379] By “biological sample” is intended any biological sample obtained from an individual, cell line, tissue culture, or other source containing prostate cancer antigen polypeptides (including portions thereof) or mRNA. As indicated, biological samples include body fluids (such as sera, plasma, urine, synovial fluid and spinal fluid) which contain cells expressing prostate cancer antigen polypeptides, prostate tissue, and other tissue sources found to express the full length or fragments thereof of a prostate cancer antigen. Methods for obtaining tissue biopsies and body fluids from mammals are well known in the art. Where the biological sample is to include mRNA, a tissue biopsy is the preferred source.

[0380] Total cellular RNA can be isolated from a biological sample using any suitable technique such as the single-step guanidinium-thiocyanate-phenol-chloroform method described in Chomczynski and Sacchi, Anal. Biochem. 162:156-159 (1987). Levels of mRNA encoding the prostate cancer antigen polypeptides are then assayed using any appropriate method. These include Northern blot analysis, S1 nuclease mapping, the polymerase chain reaction (PCR), reverse transcription in combination with the polymerase chain reaction (RT-PCR), and reverse transcription in combination with the ligase chain reaction (RT-LCR).

[0381] The present invention also relates to diagnostic assays such as quantitative and diagnostic assays for detecting levels of prostate cancer antigen polypeptides, in a biological sample (e.g., cells and tissues), including determination of normal and abnormal levels of polypeptides. Thus, for instance, a diagnostic assay in accordance with the invention for detecting over-expression of prostate cancer antigens compared to normal control tissue samples may be used to detect the presence of tumors. Assay techniques that can be used to determine levels of a polypeptide, such as a prostate cancer antigen polypeptide of the present invention in a sample derived from a host are well-known to those of skill in the art. Such assay methods include radioimmunoassays, competitive-binding assays, Western Blot analysis and ELISA assays. Assaying prostate cancer antigen polypeptide levels in a biological sample can occur using any art-known method.

[0382] Assaying prostate cancer antigen polypeptide levels in a biological sample can occur using antibody-based techniques. For example, prostate cancer antigen polypeptide expression in tissues can be studied with classical immunohistological methods (Jalkanen et al., J. Cell. Biol. 101:976-985 (1985); Jalkanen, M., et al., J. Cell . Biol. 105:3087-3096 (1987)). Other antibody-based methods useful for detecting prostate cancer antigen polypeptide gene expression include immunoassays, such as the enzyme linked immunosorbent assay (ELISA) and the radioimmunoassay (RIA). Suitable antibody assay labels are known in the art and include enzyme labels, such as, glucose oxidase, and radioisotopes, such as iodine (¹²⁵I, ¹²¹I), carbon (¹⁴C), sulfur (³⁵S), tritium (³H), indium (¹¹²In), and technetium (^{99m}Tc), and fluorescent labels, such as fluorescein and rhodamine, and biotin.

[0383] The tissue or cell type to be analyzed will generally include those which are known, or suspected, to express the prostate cancer antigen gene (such as, for example, cells of the prostate or prostate cancer). The protein isolation methods employed herein may, for example, be such as those described in Harlow and Lane (Harlow, E. and Lane, D., 1988, “Antibodies: A Laboratory Manual”, Cold Spring Harbor Laboratory Press, Cold Spring Harbor, N.Y.), which is incorporated herein by reference in its entirety. The isolated cells can be derived from cell culture or from a patient. The analysis of cells taken from culture may be a necessary step in the assessment of cells that could be used as part of a cell-based gene therapy technique or, alternatively, to test the effect of compounds on the expression of the prostate cancer antigen gene.

[0384] For example, antibodies, or fragments of antibodies, such as those described herein, may be used to quantitatively or qualitatively detect the presence of prostate cancer antigen gene products or conserved variants or peptide fragments thereof. This can be accomplished, for example, by immunofluorescence techniques employing a fluorescently labeled antibody coupled with light microscopic, flow-cytometric, or fluorimetric detection.

[0385] In a preferred embodiment, antibodies, or fragments of antibodies directed to any one or all of the predicted epitope domains of the prostate cancer antigen polypeptides (Shown in Table 1A, column 6) may be used to quantitatively or qualitatively detect the presence of prostate cancer antigen gene products or conserved variants or peptide fragments thereof. This can be accomplished, for example, by immunofluorescence techniques employing a fluorescently labeled antibody coupled with light microscopic, flow cytometric, or fluorimetric detection.

[0386] In an additional preferred embodiment, antibodies, or fragments of antibodies directed to a conformational epitope of a prostate cancer antigen may be used to quantitatively or qualitatively detect the presence of prostate cancer antigen gene products or conserved variants or peptide fragments thereof. This can be accomplished, for example, by immunofluorescence techniques employing a fluorescently labeled antibody coupled with light microscopic, flow cytometric, or fluorimetric detection.

[0387] The antibodies (or fragments thereof), and/or prostate cancer antigen polypeptides of the present invention may, additionally, be employed histologically, as in immunofluorescence, immunoelectron microscopy or non-immunological assays, for in situ detection of prostate cancer antigen gene products or conserved variants or peptide fragments thereof. In situ detection may be accomplished by removing a histological specimen from a patient, and applying thereto a labeled antibody or prostate cancer antigen polypeptide of the present invention. The antibody (or fragment thereof) or prostate cancer antigen polypeptide is preferably applied by overlaying the labeled antibody (or fragment) onto a biological sample. Through the use of such a procedure, it is possible to determine not only the presence of the prostate cancer antigen gene product, or conserved variants or peptide fragments, or prostate cancer antigen polypeptide binding, but also its distribution in the examined tissue. Using the present invention, those of ordinary skill will readily perceive that any of a wide variety of histological methods (such as staining procedures) can be modified in order to achieve such in situ detection.

[0388] Immunoassays and non-immunoassays for prostate cancer antigen gene products or conserved variants or peptide fragments thereof will typically comprise incubating a sample, such as a biological fluid, a tissue extract, freshly harvested cells, or lysates of cells which have been incubated in cell culture, in the presence of a detectably labeled antibody capable of binding prostate cancer antigen gene products or conserved variants or peptide fragments thereof, and detecting the bound antibody by any of a number of techniques well-known in the art.

[0389] The biological sample may be brought in contact with and immobilized onto a solid phase support or carrier such as nitrocellulose, or other solid support which is capable of immobilizing cells, cell particles or soluble proteins. The support may then be washed with suitable buffers followed by treatment with the detectably labeled anti-prostate cancer antigen antibody or detectable prostate cancer antigen polypeptide. The solid phase support may then be washed with the buffer a second time to remove unbound antibody or polypeptide. Optionally the antibody is subsequently labeled. The amount of bound label on solid support may then be detected by conventional means.

[0390] By “solid phase support or carrier” is intended any support capable of binding an antigen or an antibody. Well-known supports or carriers include glass, polystyrene, polypropylene, polyethylene, dextran, nylon, amylases, natural and modified celluloses, polyacrylamides, gabbros, and magnetite. The nature of the carrier can be either soluble to some extent or insoluble for the purposes of the present invention. The support material may have virtually any possible structural configuration so long as the coupled molecule is capable of binding to an antigen or antibody. Thus, the support configuration may be spherical, as in a bead, or cylindrical, as in the inside surface of a test tube, or the external surface of a rod. Alternatively, the surface may be flat such as a sheet, test strip, etc. Preferred supports include polystyrene beads. Those skilled in the art will know many other suitable carriers for binding antibody or antigen, or will be able to ascertain the same by use of routine experimentation.

[0391] The binding activity of a given lot of anti- prostate cancer antigen antibody or prostate cancer antigen polypeptide may be determined according to well known methods. Those skilled in the art will be able to determine operative and optimal assay conditions for each determination by employing routine experimentation.

[0392] In addition to assaying prostate cancer antigen polypeptide levels or polynucleotide levels in a biological sample obtained from an individual, prostate cancer antigen polypeptide or polynucleotide can also be detected in vivo by imaging. For example, in one embodiment of the invention, prostate cancer antigen polypeptide and/or anti-prostate cancer antigen antibodies are used to image prostate diseased cells, such as neoplasms. In another embodiment, prostate cancer antigen polynucleotides of the invention (e.g., polynucleotides complementary to all or a portion of prostate cancer antigen mRNA) and/or anti-prostate cancer antigen antibodies (e.g., antibodies directed to any one or a combination of the epitopes of prostate cancer antigens, antibodies directed to a conformational epitope of prostate cancer antigens, antibodies directed to the full length polypeptide expressed on the cell surface of a mammalian cell) are used to image diseased or neoplastic cells of the prostate.

[0393] Antibody labels or markers for in vivo imaging of prostate cancer antigen polypeptides include those detectable by X-radiography, NMR, MRI, CAT-scans or ESR. For X-radiography, suitable labels include radioisotopes such as barium or cesium, which emit detectable radiation but are not overtly harmful to the subject. Suitable markers for NMR and ESR include those with a detectable characteristic spin, such as deuterium, which may be incorporated into the antibody by labeling of nutrients for the relevant hybridoma. Where in vivo imaging is used to detect enhanced levels of prostate cancer antigen polypeptides for diagnosis in humans, it may be preferable to use human antibodies or “humanized” chimeric monoclonal antibodies. Such antibodies can be produced using techniques described herein or otherwise known in the art. For example methods for producing chimeric antibodies are known in the art. See, for review, Morrison, Science 229:1202 (1985); Oi et al., BioTechniques 4:214 (1986); Cabilly et al., U.S. Pat. No. 4,816,567; Taniguchi et al., EP 171496; Morrison et al., EP 173494; Neuberger et al., WO 8601533; Robinson et al., WO 8702671; Boulianne et al., Nature 312:643 (1984); Neuberger et al., Nature 314:268 (1985).

[0394] Additionally, any prostate cancer antigen polypeptides whose presence can be detected, can be administered. For example, prostate cancer antigen polypeptides labeled with a radio-opaque or other appropriate compound can be administered and visualized in vivo, as discussed, above for labeled antibodies. Further such prostate cancer antigen polypeptides can be utilized for in vitro diagnostic procedures.

[0395] A prostate cancer antigen polypeptide-specific antibody or antibody fragment which has been labeled with an appropriate detectable imaging moiety, such as a radioisotope (for example, ¹³¹I, ¹¹²In, ^{99m}Tc), a radio-opaque substance, or a material detectable by nuclear magnetic resonance, is introduced (for example, parenterally, subcutaneously or intraperitoneally) into the mammal to be examined for a prostate disorder. It will be understood in the art that the size of the subject and the imaging system used will determine the quantity of imaging moiety needed to produce diagnostic images. In the case of a radioisotope moiety, for a human subject, the quantity of radioactivity injected will normally range from about 5 to 20 millicuries of ^{99m}Tc. The labeled antibody or antibody fragment will then preferentially accumulate at the location of cells which contain prostate cancer antigen protein. In vivo tumor imaging is described in S. W. Burchiel et al., “Immunopharmacokinetics of Radiolabeled Antibodies and Their Fragments” (Chapter 13 in Tumor Imaging: The Radiochemical Detection of Cancer, S. W. Burchiel and B. A. Rhodes, eds., Masson Publishing Inc. (1982)).

[0396] With respect to antibodies, one of the ways in which the anti-prostate cancer antigen antibody can be detectably labeled is by linking the same to an enzyme and using the linked product in an enzyme immunoassay (EIA) (Voller, A., “The Enzyme Linked Immunosorbent Assay (ELISA)”, 1978, Diagnostic Horizons 2:1-7, Microbiological Associates Quarterly Publication, Walkersville, Md.); Voller et al., J. Clin. Pathol. 31:507-520 (1978); Butler, J. E., Meth. Enzymol. 73:482-523 (1981); Maggio, E. (ed.), 1980, Enzyme Immunoassay, CRC Press, Boca Raton, Fla.,; Ishikawa, E. et al., (eds.), 1981, Enzyme Immunoassay, Kgaku Shoin, Tokyo). The enzyme, which is bound to the antibody will react with an appropriate substrate, preferably a chromogenic substrate, in such a manner as to produce a chemical moiety which can be detected, for example, by spectrophotometric, fluorimetric or by visual means. Enzymes which can be used to detectably label the antibody include, but are not limited to, malate dehydrogenase, staphylococcal nuclease, delta-5-steroid isomerase, yeast alcohol dehydrogenase, alpha-glycerophosphate, dehydrogenase, triose phosphate isomerase, horseradish peroxidase, alkaline phosphatase, asparaginase, glucose oxidase, beta-galactosidase, ribonuclease, urease, catalase, glucose-6-phosphate dehydrogenase, glucoamylase and acetylcholinesterase. Additionally, the detection can be accomplished by colorimetric methods which employ a chromogenic substrate for the enzyme. Detection may also be accomplished by visual comparison of the extent of enzymatic reaction of a substrate in comparison with similarly prepared standards.

[0397] Detection may also be accomplished using any of a variety of other immunoassays. For example, by radioactively labeling the antibodies or antibody fragments, it is possible to detect prostate cancer antigens through the use of a radioimmunoassay (RIA) (see, for example, Weintraub, B., Principles of Radioimmunoassays, Seventh Training Course on Radioligand Assay Techniques, The Endocrine Society, March, 1986, which is incorporated by reference herein). The radioactive isotope can be detected by means including, but not limited to, a gamma counter, a scintillation counter, or autoradiography.

[0398] It is also possible to label the antibody with a fluorescent compound. When the fluorescently labeled antibody is exposed to light of the proper wave length, its presence can then be detected due to fluorescence. Among the most commonly used fluorescent labeling compounds are fluorescein isothiocyanate, rhodamine, phycoerythrin, phycocyanin, allophycocyanin, ophthaldehyde and fluorescamine.

[0399] The antibody can also be detectably labeled using fluorescence emitting metals such as ¹⁵²Eu, or others of the lanthanide series. These metals can be attached to the antibody using such metal chelating groups as diethylenetriaminepentacetic acid (DTPA) or ethylenediaminetetraacetic acid (EDTA).

[0400] The antibody also can be detectably labeled by coupling it to a chemiluminescent compound. The presence of the chemiluminescent-tagged antibody is then determined by detecting the presence of luminescence that arises during the course of a chemical reaction. Examples of particularly useful chemiluminescent labeling compounds are luminol, isoluminol, theromatic acridinium ester, imidazole, acridinium salt and oxalate ester.

[0401] Likewise, a bioluminescent compound may be used to label the antibody of the present invention. Bioluminescence is a type of chemiluminescence found in biological systems in, which a catalytic protein increases the efficiency of the chemiluminescent reaction. The presence of a bioluminescent protein is determined by detecting the presence of luminescence. Important bioluminescent compounds for purposes of labeling are luciferin, luciferase and aequorin.

### Methods for Detecting Prostate Disease, Including Cancer

[0402] In general, a prostate disease or cancer may be detected in a patient based on the presence of one or more prostate cancer antigen proteins of the invention and/or polynucleotides encoding such proteins in a biological sample (for example, blood, sera, urine, and/or tumor biopsies) obtained from the patient. In other words, such proteins and/or polynucleotides may be used as markers to indicate the presence or absence of a prostate disease or disorder, including cancer. Cancers that may be diagnosed, and/or prognosed using the compositions of the invention include but are not limited to, prostate cancer. In addition, such proteins and/or polynucleotides may be useful for the detection of other diseases and cancers, including cancers of tissues/cells corresponding to the library source disclosed in column 7 of Table 1A expressing the corresponding prostate cancer sequence disclosed in the same row of Table 1A. The binding agents provided herein generally permit detection of the level of antigen that binds to the agent in the biological sample. Polynucleotide primers and probes may be used to detect the level of mRNA encoding prostate cancer antigen polypeptides, which is also indicative of the presence or absence of a prostate disease or disorder, including cancer. In general, prostate cancer antigen polypeptides should be present at a level that is at least three fold higher in diseased tissue than in normal tissue.

[0403] There are a variety of assay formats known to those of ordinary skill in the art for using a binding agent to detect polypeptide markers in a sample. See, e.g., Harlow and Lane, supra. In general, the presence or absence of a prostate disease in a patient may be determined by (a) contacting a biological sample obtained from a patient with a binding agent; (b) detecting in the sample a level of polypeptide that binds to the binding agent; and (c) comparing the level of polypeptide with a predetermined cut-off value.

[0404] In a preferred embodiment, the assay involves the use of binding agent immobilized on a solid support to bind to and remove the prostate cancer antigen polypeptide of the invention from the remainder of the sample. The bound polypeptide may then be detected using a detection reagent that contains a reporter group and specifically binds to the binding agent/polypeptide complex. Such detection reagents may comprise, for example, a binding agent that specifically binds to the polypeptide or an antibody or other agent that specifically binds to the binding agent, such as an anti-immunoglobulin, protein G, protein A or a lectin. Alternatively, a competitive assay may be utilized, in which a polypeptide is labeled with a reporter group and allowed to bind to the immobilized binding agent after incubation of the binding agent with the sample. The extent to which components of the sample inhibit the binding of the labeled polypeptide to the binding agent is indicative of the reactivity of the sample with the immobilized binding agent. Suitable polypeptides for use within such assays include prostate cancer antigen polypeptides and portions thereof, or antibodies, to which the binding agent binds, as described above.

[0405] The solid support may be any material known to those of skill in the art to which prostate cancer antigen polypeptides of the invention may be attached. For example, the solid support may be a test well in a microtiter plate or a nitrocellulose or other suitable membrane. Alternatively, the support may be a bead or disc, such as glass fiberglass, latex or a plastic material such as polystyrene or polyvinylchloride. The support may also be a magnetic particle or a fiber optic sensor, such as those disclosed, for example, in U.S. Pat. No. 5,359,681. The binding agent may be immobilized on the solid support using a variety of techniques known to those of skill in the art, which are amply described in the patent and scientific literature. In the context of the present invention, the term “immobilization” refers to both noncovalent association, such as adsorption, and covalent attachment (which may be a direct linkage between the agent and functional groups on the support or may be a linkage by way of a cross-linking agent). Immobilization by adsorption to a well in a microtiter plate or to a membrane is preferred. In such cases, adsorption may be achieved by contacting the binding agent, in a suitable buffer, with the solid support for the suitable amount of time. The contact time varies with temperature, but is typically between about 1 hour and about 1 day. In general, contacting a well of plastic microtiter plate (such as polystyrene or polyvinylchloride) with an amount of binding agent ranging from about 10 ng to about 10 ug, and preferably about 100 ng to about 1 ug, is sufficient to immobilize an adequate amount of binding agent.

[0406] Covalent attachment of binding agent to a solid support may generally be achieved by first reacting the support with a bifunctional reagent that will react with both the support and a functional group, such as a hydroxyl or amino group, on the binding agent. For example, the binding agent may be covalently attached to supports having an appropriate polymer coating using benzoquinone or by condensation of an aldehyde group on the support with an amine and an active hydrogen on the binding partner (see, e.g., Pierce Immunotechnology Catalog and Handbook, 1991, at A12-A13).

### Gene Therapy Methods

[0407] Also encompassed by the present invention are gene therapy methods for treating or preventing disorders, diseases and conditions. The gene therapy methods relate to the introduction of nucleic acid (DNA, RNA and antisense DNA or RNA) sequences into an animal to achieve expression of a prostate cancer_antigen of the present invention. This method requires a polynucleotide which codes for a polypeptide of the present invention operatively linked to a promoter and any other genetic elements necessary for the expression of the polypeptide by the target tissue. Such gene-therapy and delivery techniques are known in the art, see, for example, WO90/11092, which is herein incorporated by reference.

[0408] Thus, for example, cells from a patient may be engineered with a polynucleotide (DNA or RNA) comprising a promoter operably linked to a polynucleotide of the present invention ex vivo, with the engineered cells then being provided to a patient to be treated with the polypeptide of the present invention. Such methods are well-known in the art. For example, see Belldegrun, A., et al., J. Natl. Cancer Inst. 85: 207-216 (1993); Ferrantini, M. et al., Cancer Research 53: 1107-1112 (1993); Ferrantini, M. et al., J. Immunology 153: 4604-4615 (1994); Kaido, T., et al., Int. J. Cancer 60: 221-229 (1995); Ogura, H., et al., Cancer Research 50: 5102-5106 (1990); Santodonato, L., et al., Human Gene Therapy 7:1-10 (1996); Santodonato, L., et al., Gene Therapy 4:1246-1255 (1997); and Zhang, J.-F. et al., Cancer Gene Therapy 3: 31-38 (1996)), which are herein incorporated by reference. In one embodiment, the cells, which are engineered are arterial cells. The arterial cells may be reintroduced into the patient through direct injection to the artery, the tissues surrounding the artery, or through catheter injection.

[0409] As discussed in more detail below, the polynucleotide constructs can be delivered by any method that delivers injectable materials to the cells of an animal, such as, injection into the interstitial space of tissues (heart, muscle, skin, lung, liver, and the like). The polynucleotide constructs may be delivered in a pharmaceutically acceptable liquid or aqueous carrier.

[0410] In one embodiment, the polynucleotide of the present invention is delivered as a naked polynucleotide. The term “naked” polynucleotide, DNA or RNA refers to sequences that are free from any delivery vehicle that acts to assist, promote or facilitate entry into the cell, including viral sequences, viral particles, liposome formulations, lipofectin or precipitating agents and the like. However, the polynucleotide of the present invention can also be delivered in liposome formulations and lipofectin formulations and the like can be prepared-by methods well known to those skilled in the art. Such methods are described, for example, in U.S. Pat. Nos. 5,593,972, 5,589,466, and 5,580,859, which are herein incorporated by reference.

[0411] The polynucleotide vector constructs used in the gene therapy method are preferably constructs that will not integrate into the host genome nor will they contain sequences that allow for replication. Appropriate vectors include pWLNEO, pSV2CAT, pOG44, pXT1 and pSG available from Stratagene; pSVK3, pBPV, pMSG and pSVL available from Pharmacia; and pEF1/V5, pcDNA3.1, and pRc/CMV2 available from Invitrogen. Other suitable vectors will be readily apparent to the skilled artisan.

[0412] Any strong promoter known to those skilled- in the art can be used for driving the expression of the polynucleotide sequence. Suitable promoters include adenoviral promoters, such as the adenoviral major late promoter; or heterologous promoters, such as the cytomegalovirus (CMV) promoter; the respiratory syncytial virus (RSV) promoter; inducible promoters, such as the MMT promoter, the metallothionein promoter; heat shock promoters; the albumin promoter; the ApoAI promoter; human globin promoters; viral thymidine kinase promoters, such as the Herpes Simplex thymidine kinase promoter; retroviral LTRs; the b-actin promoter; and human growth hormone promoters. The promoter also may be the native promoter for the polynucleotide of the present invention.

[0413] Unlike other gene therapy techniques, one major advantage of introducing naked nucleic acid sequences into target cells is the transitory nature of the polynucleotide synthesis in the cells. Studies have shown that non-replicating DNA sequences can be introduced into cells to provide production of the desired polypeptide for periods of up to six months.

[0414] The polynucleotide construct can be delivered to the interstitial space of tissues within the an animal, including of muscle, skin, brain, lung, liver, spleen, bone marrow, thymus, heart, lymph, blood, bone, cartilage, pancreas, kidney, gall bladder, stomach, intestine, testis, ovary, uterus, rectum, nervous system, eye, gland, and connective tissue. Interstitial space of the tissues comprises the intercellular, fluid, mucopolysaccharide matrix among the reticular fibers of organ tissues, elastic fibers in the walls of vessels or chambers, collagen fibers of fibrous tissues, or that same matrix within connective tissue ensheathing muscle cells or in the lacunae of bone. It is similarly the space occupied by the plasma of the circulation and the lymph fluid of the lymphatic channels. Delivery to the interstitial space of muscle tissue is preferred for the reasons discussed below. They may be conveniently delivered by injection into the tissues comprising these cells. They are preferably delivered to and expressed in persistent, non-dividing cells which are differentiated, although delivery and expression may be achieved in non-differentiated or less completely differentiated cells, such as, for example, stem cells of blood or skin fibroblasts. In vivo muscle cells are particularly competent in their ability to take up and express polynucleotides.

[0415] For the naked nucleic acid sequence injection, an effective dosage amount of DNA or RNA will be in the range of from about 0.05 mg/kg body weight to about 50 mg/kg body weight. Preferably the dosage will be from about 0.005 mg/kg to about 20 mg/kg and more preferably from about 0.05 mg/kg to about 5 mg/kg. Of course, as the artisan of ordinary skill will appreciate, this dosage will vary according to the tissue site of injection. The appropriate and effective dosage of nucleic acid sequence can readily be determined by those of ordinary skill in the art and may depend on the condition being treated and the route of administration.

[0416] The preferred route of administration is by the parenteral route of injection into the interstitial space of tissues. However, other parenteral routes may also be used, such as, inhalation of an aerosol formulation particularly for delivery to lungs or bronchial tissues, throat or mucous membranes of the nose. In addition, naked DNA constructs can be delivered to arteries during angioplasty by the catheter used in the procedure.

[0417] The naked polynucleotides are delivered by any method known in the art, including, but not limited to, direct needle injection at the delivery site, intravenous injection, topical administration, catheter infusion, and so-called “gene guns”. These delivery methods are known in the art.

[0418] The constructs may also be delivered with delivery vehicles such as viral sequences, viral particles, liposome formulations, lipofectin, precipitating agents, etc. Such methods of delivery are known in the art.

[0419] In certain embodiments, the polynucleotide constructs are complexed in a liposome preparation. Liposomal preparations for use in the instant invention include cationic (positively charged), anionic (negatively charged) and neutral preparations. However, cationic liposomes are particularly preferred because a tight charge complex can be formed between the cationic liposome and the polyanionic nucleic acid. Cationic liposomes have been shown to mediate intracellular delivery of plasmid DNA (Felgner et al., Proc. Natl. Acad. Sci. USA (1987) 84:7413-7416, which is herein incorporated by reference); mRNA (Malone et al., Proc. Natl. Acad. Sci. USA (1989) 86:6077-6081, which is herein incorporated by reference); and purified transcription factors (Debs et al., J. Biol. Chem. (1990) 265:10189-10192, which is herein incorporated by reference), in functional form.

[0420] Cationic liposomes are readily available. For example, N[1-2,3-dioleyloxy)propyl]-N,N,N-triethylammonium (DOTMA) liposomes are particularly useful and are available under the trademark Lipofectin, from GIBCO BRL, Grand Island, N.Y., (see, also, Felgner et al., Proc. Natl Acad. Sci. USA (1987) 84:7413-7416, which is herein incorporated by reference). Other commercially available liposomes include transfectace (DDAB/DOPE) and DOTAP/DOPE (Boehringer).

[0421] Other cationic liposomes can be prepared from readily available materials using techniques well known in the art. See, e.g. PCT Publication No. WO 90/11092 (which is herein incorporated by reference) for a description of the synthesis of DOTAP (1,2-bis(oleoyloxy)-3-(trimethylammonio)propane) liposomes. Preparation of DOTMA liposomes is explained in the literature, see, e.g., P. Felgner et al., Proc. Natl. Acad. Sci. USA 84:7413-7417, which is herein incorporated by reference. Similar methods can be used to prepare liposomes from other cationic lipid materials.

[0422] Similarly, anionic and neutral liposomes are readily available, such as from Avanti Polar Lipids (Birmingham, Ala.); or can be easily prepared using readily available materials. Such materials include phosphatidyl choline, cholesterol, phosphatidyl ethanolamine, dioleoylphosphatidyl choline (DOPC), dioleoylphosphatidyl glycerol (DOPG), dioleoylphoshatidyl ethanolamine (DOPE), among others. These materials can also be mixed with the DOTMA and DOTAP starting materials in appropriate ratios. Methods for making liposomes using these materials are well known in the art.

[0423] For example, commercially dioleoylphosphatidyl choline (DOPC), dioleoylphosphatidyl glycerol (DOPG), and dioleoylphosphatidyl ethanolamine (DOPE) can be used in various combinations to make conventional liposomes, with or without the addition of cholesterol. Thus, for example, DOPG/DOPC vesicles can be prepared by drying 50 mg each of DOPG and DOPC under a stream of nitrogen gas into a sonication vial. The sample is placed under a vacuum pump overnight and is hydrated the following day with deionized water. The sample is then sonicated for 2 hours in a capped vial, using a Heat Systems model 350 sonicator equipped with an inverted cup (bath type) probe at the maximum setting while the bath is circulated at 15EC. Alternatively, negatively charged vesicles can be prepared without sonication to produce multilamellar vesicles or by extrusion through nucleopore membranes to produce unilamellar vesicles of discrete size. Other methods are known and available to those of skill in the art.

[0424] The liposomes can comprise multilamellar vesicles (MLVs), small unilamellar vesicles (SUVs), or large unilamellar vesicles (LUVs), with SUVs being preferred. The various liposome-nucleic acid complexes are prepared using methods well known in the art. See, e.g., Straubinger et al., Methods of Immunology (1983), 101:512-527, which is herein incorporated by reference. For example, MLVs containing nucleic acid can be prepared by depositing a thin film of phospholipid on the walls of a glass tube and subsequently hydrating with a solution of the material to be encapsulated. SUVs are prepared by extended sonication of MLVs to produce a homogeneous population of unilamellar liposomes. The material to be entrapped is added to a suspension of preformed MLVs and then sonicated. When using liposomes containing cationic lipids, the dried lipid film is resuspended in an appropriate solution such as sterile water or an isotonic buffer solution such as 10 mM Tris/NaCl, sonicated, and then the preformed liposomes are mixed directly with the DNA. The liposome and DNA form a very stable complex due to binding of the positively charged liposomes to the cationic DNA. SUVs find use with small nucleic acid fragments. LUVs are prepared by a number of methods, well known in the art. Commonly used methods include Ca²⁺-EDTA chelation (Papahadjopoulos et al., Biochim. Biophys. Acta (1975) 394:483; Wilson et al., Cell 17:77 (1979); ether injection (Deamer, D. and Bangham, A., Biochim. Biophys. Acta 443:629 (1976); Ostro et al., Biochem. Biophys. Res. Commun. 76:836 (1977); Fraley et al., Proc. Natl. Acad. Sci. USA 76:3348 (1979)); detergent dialysis (Enoch, H. and Strittmatter, P., Proc. Natl. Acad. Sci. USA 76:145 (1979)); and reverse-phase evaporation (REV) (Fraley et al., J. Biol. Chem. 255:10431 (1980); Szoka et al., Proc. Natl. Acad. Sci. USA 75:145 (1978); Schaefer-Ridder et al., Science 215:166 (1982)), which are herein incorporated by reference.

[0425] Generally, the ratio of DNA to liposomes will be from about 10:1 to about 1:10. Preferably, the ration will be from about 5:1 to about 1:5. More preferably, the ration will be about 3:1 to about 1:3. Still more preferably, the ratio will be about 1:1.

[0426] U.S. Pat. No. 5,676,954 (which is herein incorporated by reference) reports on the injection of genetic material, complexed with cationic liposomes carriers, into mice. U.S. Pat. Nos. 4,897,355, 4,946,787, 5,049,386, 5,459,127, 5,589,466, 5,693,622, 5,580,859, 5,703,055, and international publication no. WO 94/9469 (which are herein incorporated by reference) provide cationic lipids for use in transfecting DNA into cells and mammals. U.S. Pat. Nos. 5,589,466, 5,693,622, 5,580,859, 5,703,055, and International Publication No. WO 94/9469 provide methods for delivering DNA-cationic lipid complexes to mammals.

[0427] In certain embodiments, cells are engineered, ex vivo or in vivo, using a retroviral particle containing RNA, which comprises a sequence encoding a polypeptide of the present invention. Retroviruses from which the retroviral plasmid vectors may be derived include, but are not limited to, Moloney Murine Leukemia Virus, spleen necrosis virus, Rous sarcoma Virus, Harvey Sarcoma Virus, avian leukosis virus, gibbon ape leukemia virus, human immunodeficiency virus, Myeloproliferative Sarcoma Virus, and mammary tumor virus.

[0428] The retroviral plasmid vector is employed to transduce packaging cell lines to form producer cell lines. Examples of packaging cells which may be transfected include, but are not limited to, the PE501, PA317, R-2, R-AM, PA12, T19-14X, VT-19-17-H2, RCRE, RCRIP, GP+E-86, GP+envAm12, and DAN cell lines as described in Miller, Human Gene Therapy 1:5-14 (1990), which is incorporated herein by reference in its entirety. The vector may transduce the packaging cells through any means known in the art. Such means include, but are not limited to, electroporation, the use of liposomes, and CaPO₄ precipitation. In one alternative, the retroviral plasmid vector may be encapsulated into a liposome, or coupled to a lipid, and then administered to a host.

[0429] The producer cell line generates infectious retroviral vector particles, which include polynucleotide encoding a polypeptide of the present invention. Such retroviral vector particles then may be employed, to transduce eukaryotic cells, either in vitro or in vivo. The transduced eukaryotic cells will express a polypeptide of the present invention.

[0430] In certain other embodiments, cells are engineered, ex vivo or in vivo, with polynucleotide contained in an adenovirus vector. Adenovirus can be manipulated such that it encodes and expresses a polypeptide of the present invention, and at the same time is inactivated in terms of its ability to replicate in a normal lytic viral life cycle. Adenovirus expression is achieved without integration of the viral DNA into the host cell chromosome, thereby alleviating concerns about insertional mutagenesis. Furthermore, adenoviruses have been used as live enteric vaccines for many years with an excellent safety profile (Schwartz, et al., Am. Rev. Respir. Dis.109:233-238 (1974)). Finally, adenovirus mediated gene transfer has been demonstrated in a number of instances including transfer of alpha-1-antitrypsin and CFTR to the lungs of cotton rats (Rosenfeld et al., Science 252:431-434 (1991); Rosenfeld et al., Cell 68:143-155 (1991)). Furthermore, extensive studies to attempt to establish adenovirus as a causative agent in human cancer were uniformly negative (Green et al., Proc. Natl. Acad. Sci. USA 76:6606 (1979)).

[0431] Suitable adenoviral vectors useful in the present invention are described, for example, in Kozarsky and Wilson, Curr. Opin. Genet. Devel. 3:499-503 (1993); Rosenfeld et al., Cell 68:143-155 (1992); Engelhardt et al., Human Genet. Ther. 4:759-769 (1993); Yang et al., Nature Genet. 7:362-369 (1994); Wilson et al., Nature 365:691-692 (1993); and U.S. Pat. No. 5,652,224, which are herein incorporated by reference. For example, the adenovirus vector Ad2 is useful and can be grown in human 293 cells. These cells contain the E1 region of adenovirus and constitutively express E1a and E1b, which complement the defective adenoviruses by providing the products of the genes deleted from the vector. In addition to Ad2, other varieties of adenovirus (e.g., Ad3, Ad5, and Ad7) are also useful in the present invention.

[0432] Preferably, the adenoviruses used in the present invention are replication deficient. Replication deficient adenoviruses require the aid of a helper virus and/or packaging cell line to form infectious particles. The resulting virus is capable of infecting cells and can express a polynucleotide of interest which is operably linked to a promoter, but cannot replicate in most cells. Replication deficient adenoviruses may be deleted in one or -more of all or a portion of the following genes: E1a, E1b, E3, E4, E2a, or L1 through L5.

[0433] In certain other embodiments, the cells are engineered, ex vivo or in vivo, using an adeno-associated virus (AAV). AAVs are naturally occurring defective viruses that require helper viruses to produce infectious particles (Muzyczka, N., Curr. Topics in Microbiol. Immunol. 158:97 (1992)). It is also one of the few viruses that may integrate its DNA into non-dividing cells. Vectors containing as little as 300 base pairs of AAV can be packaged and can integrate, but space for exogenous DNA is limited to about 4.5 kb. Methods for producing and using such AAVs are known in the art. See, for example, U.S. Pat. Nos. 5,139,941, 5,173,414, 5,354,678, 5,436,146, 5,474,935, 5,478,745, and 5,589,377.

[0434] For example, an appropriate AAV vector for use in the present invention will include all the sequences necessary for DNA replication, encapsidation, and host-cell integration. The polynucleotide construct is inserted into the AAV vector using standard cloning methods, such as those found in Sambrook et al., Molecular Cloning: A Laboratory Manual, Cold Spring Harbor Press (1989). The recombinant AAV vector is then transfected into packaging cells which are infected with a helper virus, using any standard technique, including lipofection, electroporation, calcium phosphate precipitation, etc. Appropriate helper viruses include adenoviruses, cytomegaloviruses, vaccinia viruses, or herpes viruses. Once the packaging cells are transfected and infected, they will produce infectious AAV viral particles, which contain the polynucleotide construct. These viral particles are then used to transduce eukaryotic cells, either ex vivo or in vivo. The transduced cells will contain the polynucleotide construct integrated into its genome, and will express a polypeptide of the invention.

[0435] Another method of gene therapy involves operably associating heterologous control regions and endogenous prostate cancer antigen polynucleotide sequences (e.g., encoding a prostate cancer antigen polypeptide of the present invention) via homologous recombination (see, e.g., U.S. Pat. No. 5,641,670, issued Jun. 24, 1997; International Publication No. WO 96/29411, published Sep. 26, 1996; International Publication No. WO 94/12650, published Aug. 4, 1994; Koller et al., Proc. Natl. Acad. Sci. USA 86:8932-8935 (1989); and Zijlstra et al., Nature 342:435-438 (1989), which are herein incorporated by reference. This method involves the activation of a gene which is present in the target cells, but which is not normally expressed in the cells, or is expressed at a lower level than desired.

[0436] Polynucleotide constructs are made, using standard techniques known in the art, which. contain the promoter with targeting sequences flanking the promoter. Suitable promoters are described herein. The targeting sequence is sufficiently complementary to an endogenous sequence to permit homologous recombination of the promoter-targeting sequence with the endogenous sequence. The targeting sequence will be sufficiently near the 5′ end of the desired endogenous polynucleotide sequence so the promoter will be operably linked to the endogenous sequence upon homologous recombination.

[0437] The promoter and the targeting sequences can be amplified using PCR. Preferably, the amplified promoter contains distinct restriction enzyme sites on the 5′ and 3′ ends. Preferably, the 3′ end of the first targeting sequence contains the same restriction enzyme site as the 5′ end of the amplified promoter and the 5′ end of the second targeting sequence contains the same restriction site as the 3′ end of the amplified promoter. The amplified promoter and targeting sequences are digested and ligated together.

[0438] The promoter-targeting sequence construct is delivered to the cells, either as naked polynucleotide, or in conjunction with transfection-facilitating agents, such as liposomes, viral sequences, viral particles, whole viruses; lipofection, precipitating agents, etc., described in more detail above. The P promoter-targeting sequence can be delivered by any method, included direct needle injection, intravenous injection, topical administration, catheter infusion, particle accelerators, etc. The methods are described in more detail below.

[0439] The promoter-targeting sequence construct is taken up by cells. Homologous recombination between the construct and the endogenous sequence takes place, such that an endogenous sequence is placed under the control of the promoter. The promoter then drives the expression of the endogenous sequence.

[0440] The polynucleotide encoding a polypeptide of the present invention may contain a secretory signal sequence that facilitates secretion of the protein. Typically, the signal sequence is positioned in the coding region of the polynucleotide to be expressed towards or at the 5′ end of the coding region. The signal sequence may be homologous or heterologous to the prostate cancer antigen polynucleotide of interest and may be homologous or heterologous to the cells to be transfected. Additionally, the signal sequence may be chemically synthesized using methods known in the art.

[0441] Any mode of administration of any of the above-described polynucleotides constructs can be used so long as the mode results in the expression of one or more molecules in an amount sufficient to provide a therapeutic effect. This includes direct needle injection, systemic injection, catheter infusion, biolistic injectors, particle accelerators (i.e., “gene guns”), gelfoam sponge depots, other commercially available depot materials, osmotic pumps (e.g., Alza minipumps), oral or suppositorial solid (tablet or pill) pharmaceutical formulations, and decanting or topical applications during surgery. For example, direct injection of naked calcium phosphate-precipitated plasmid into rat liver and rat spleen or a protein-coated plasmid into the portal vein has resulted in gene expression of the foreign gene in the rat livers (Kaneda et al., Science 243:375 (1989)).

[0442] A preferred method of local administration is by direct injection. Preferably, a recombinant molecule of the present invention complexed with a delivery vehicle is administered by direct injection into or locally within the area of arteries. Administration of a composition locally within the area of arteries refers to injecting the composition centimeters and preferably, millimeters within arteries.

[0443] Another method of local administration is to contact a polynucleotide construct of the present invention in or around a surgical wound. For example, a patient can undergo surgery and the polynucleotide construct can be coated on the surface of tissue inside the wound or the construct can be injected into areas of tissue inside the wound.

[0444] Therapeutic compositions useful in systemic administration, include recombinant molecules of the present invention complexed to a targeted delivery vehicle of the present invention. Suitable delivery vehicles for use with systemic administration comprise liposomes comprising ligands for targeting the vehicle to a particular site. In specific embodiments, suitable delivery vehicles for use with systemic administration comprise liposomes comprising polypeptides of the invention for targeting the vehicle to a particular site.

[0445] Preferred methods of systemic administration, include intravenous injection, aerosol, oral and percutaneous (topical) delivery. Intravenous injections can be performed using methods standard in the art. Aerosol delivery can also be performed using methods standard in the art (see, for example, Stribling et al., Proc. Natl. Acad. Sci. USA 189:11277-11281, 1992, which is incorporated herein by reference). Oral delivery can be performed by complexing a polynucleotide construct of the present invention to a carrier capable of withstanding degradation by digestive enzymes in the gut of an animal. Examples of such carriers, include plastic capsules or tablets, such as those known in the art. Topical delivery can be performed by mixing a polynucleotide construct of the present invention with a lipophilic reagent (e.g., DMSO) that is capable of passing into the skin.

[0446] Determining an effective amount of substance to be delivered can depend upon a number of factors including, for example, the chemical structure and biological activity of the substance, the age and weight of the animal, the precise condition requiring treatment and its severity, and the route of administration. The frequency of treatments depends upon a number of factors, such as the amount of polynucleotide constructs administered per dose, as well as the health and history of the subject. The precise amount, number of doses, and timing of doses will be determined by the attending physician or veterinarian.

[0447] Therapeutic compositions of the present invention can be administered to any animal, preferably to mammals and birds. Preferred mammals include humans, dogs, cats, mice, rats, rabbits sheep, cattle, horses and pigs, with humans being particularly preferred.

### Biological Activities

[0448] Polynucleotides or polypeptides, or agonists or antagonists of the present invention, can be used in assays to test for one or more biological activities. If these polynucleotides or polypeptides, or agonists or antagonists of the present invention, do exhibit activity in a particular assay, it is likely that these molecules may be involved in the diseases associated with the biological activity. Thus, the polynucleotides and polypeptides, and agonists or antagonists could be used to treat, prevent diagnose and/or prognose the associated disease.

[0449] The prostate cancer antigen polynucleotides and polypeptides of the invention are predicted to have predominant expression in prostate tissues.

[0450] Thus, the prostate cancer antigens of the invention may be useful as therapeutic molecules. Each would be useful for diagnosis, detection, treatment and/or prevention of diseases or disorders of the prostate, including but not limited to prostate cancers such as adenocarcinoma, transitional cell carcinomas, ductal carcinomas, and squamous cell carcinomas.

[0451] In a preferred embodiment, polynucleotides of the invention (e.g., a nucleic acid sequence of SEQ ID NO:X or the complement thereof, or the cDNA sequence contained in Clone ID NO:Z, or fragments or variants thereof) and/or polypeptides of the invention (e.g., an amino acid sequence contained in SEQ ID NO:Y, an amino acid sequence encoded by SEQ ID NO:X, or the complement threof, an amino acid sequence encoded by the cDNA sequence contained in Clone ID NO:Z and fragments or variants thereof as described herein) are useful for the diagnosis, detection, treatment, and/or prevention of diseases or disorders of the tissues/cells corresponding to the library source disclosed in column 7 of Table 1A expressing the corresponding prostate cancer sequence disclosed in the same row of Table 1A. In certain embodiments, a polypeptide of the invention, or polynucleotides, antibodies, agonists, or antagonists corresponding to that polypeptide, may be used to diagnose and/or prognose diseases and/or disorders associated with the tissue(s) in which the polypeptide of the invention is expressed, including one, two, three, four, five, or more tissues disclosed in Table 1A, column 7 (Tissue Distribution Library Code).

[0452] Particularly, the prostate cancer antigens may be a useful therapeutic for prostate cancer. Treatment, diagnosis, detection, and/or prevention of prostate disorders could be carried out using a prostate cancer antigen or soluble form of a prostate cancer antigen, a prostate cancer antigen ligand, gene therapy, or ex vivo applications. Moreover, inhibitors of a prostate cancer antigen, either blocking antibodies or mutant forms, could modulate the expression of the prostate cancer antigen. These inhibitors may be useful to treat, diagnose, detect, and/or prevent diseases associated with the misregulation of a prostate cancer antigen.

[0453] In one embodiment, the invention provides a method for the specific delivery of compositions of the invention to cells (e.g., normal or diseased prostate cells) by administering polypeptides of the invention (e.g., prostate cancer antigen polypeptides or anti-prostate cancer antigen antibodies) that are associated with heterologous polypeptides or nucleic acids. In one example, the invention provides a method for delivering a therapeutic protein into the targeted cell (e.g., an aberrant prostate cell or prostate cancer cell). In another example, the invention provides a method for delivering a single stranded nucleic acid (e.g., antisense or ribozymes) or double stranded nucleic acid (e.g., DNA that can integrate into the cell's genome or replicate episomally and that can be transcribed) into the targeted cell.

[0454] In another embodiment, the invention provides a method for the specific destruction of cells (e.g., the destruction of aberrant prostate cells, including, but not limited to, prostate tumor cells) by administering polypeptides of the invention (e.g., prostate cancer antigen polypeptides or fragments thereof, or anti-prostate cancer antigen antibodies) in association with toxins or cytotoxic prodrugs.

[0455] By “toxin” is meant compounds that bind and activate endogenous cytotoxic effector systems, radioisotopes, holotoxins, modified toxins, catalytic subunits of toxins, cytotoxins (cytotoxic agents), or any molecules or enzymes not normally present in or on the surface of a cell that under defined conditions cause the cell's death. Toxins that may be used according to the methods of the invention include, but are not limited to, radioisotopes known in the art, compounds such as, for example, antibodies (or complement fixing containing portions thereof) that bind an inherent or induced endogenous cytotoxic effector system, thymidine kinase, endonuclease, RNAse, alpha toxin, ricin, abrin, Pseudomonas exotoxin A, diphtheria toxin, saporin, momordin, gelonin, pokeweed antiviral protein, alpha-sarcin and cholera toxin. “Toxin” also includes a cytostatic or cytocidal agent, a therapeutic agent or a radioactive metal ion, e.g., alpha-emitters such as, for example, ²¹³Bi, or other radioisotopes such as, for example, ¹⁰³Pd, ¹³³Xe, ¹³¹I, ⁶⁸Ge, ⁵⁷Co, ⁶⁵Zn, ⁸⁵S, ³²P, ³⁵S, ⁹⁰Y , ¹⁵³Sm, ¹⁵³Gd, ¹⁶⁹Yb, ⁵¹Cr, ⁵⁴Mn, ⁷⁵Se, ¹¹³Sn, ⁹⁰Yttrium, ¹¹⁷Tin, ¹⁸⁶Rhenium, ¹⁶⁶Holmium, and ¹⁸⁸Rhenium; luminescent labels, such as luminol; and fluorescent labels, such as fluorescein and rhodamine, and biotin.

[0456] Techniques known in the art may be applied to label antibodies of the invention. Such techniques include, but are not limited to, the use of bifunctional conjugating agents (see e.g., U.S. Pat. Nos. 5,756,065; 5,714,631; 5,696,239; 5,652,361; 5,505,931; 5,489,425; 5,435,990; 5,428,139; 5,342,604; 5,274,119; 4,994,560; and 5,808,003; the contents of each of which are hereby incorporated by reference in its entirety). A cytotoxin or cytotoxic agent includes any agent that is detrimental to cells. Examples include paclitaxol, cytochalasin B, gramicidin D, ethidium bromide, emetine, mitomycin, etoposide, tenoposide, vincristine, vinblastine, colchicin, doxorubicin, daunorubicin, dihydroxy anthracin dione, mitoxantrone, mithramycin, actinomycin D, 1-dehydrotestosterone, glucocorticoids, procaine, tetracaine, lidocaine, propranolol, and puromycin and analogs or homologs thereof. Therapeutic agents include, but are not limited to, antimetabolites (e.g., methotrexate, 6-mercaptopurine, 6-thioguanine, cytarabine, 5-fluorouracil decarbazine), alkylating agents (e.g., mechlorethamine, thioepa chlorambucil, melphalan, carmustine (BSNU) and lomustine (CCNU), cyclothosphamide, busulfan, dibromomannitol, streptozotocin, mitomycin C, and cis- dichlorodiamine platinum (II) (DDP) cisplatin), anthracyclines (e.g., daunorubicin (formerly daunomycin) and doxorubicin), antibiotics (e.g., dactinomycin (formerly actinomycin), bleomycin, mithramycin, and anthramycin (AMC)), and anti-mitotic agents (e.g., vincristine and vinblastine).

[0457] By “cytotoxic prodrug” is meant a non-toxic compound that is converted by an enzyme, normally present in the cell, into a cytotoxic compound. Cytotoxic prodrugs that may be used according to the methods of the invention include, but are not limited to, glutamyl derivatives of benzoic acid mustard alkylating agent, phosphate derivatives of etoposide or mitomycin C, cytosine arabinoside, daunorubisin, and phenoxyacetamide derivatives of doxorubicin.

[0458] It will be appreciated that conditions caused by a decrease in the standard or normal level of a prostate cancer antigen activity in an individual, particularly disorders of the prostate, can be treated by administration of a prostate cancer antigen polypeptide (e.g., such as, for example, the complete prostate cancer antigen polypeptide, the soluble form of the extracellular domain of a prostate cancer antigen polypeptide, or cells expressing the complete protein) or agonist. Thus, the invention also provides a method of treatment of an individual in need of an increased level of prostate cancer antigen activity comprising administering to such an individual a pharmaceutical composition comprising an amount of an isolated prostate cancer antigen polypeptide of the invention, or agonist thereof (e.g., an agonistic anti-prostate cancer antigen antibody), effective to increase the prostate cancer antigen activity level in such an individual.

[0459] It will also be appreciated that conditions caused by a increase in the standard or normal level of prostate cancer antigen activity in an individual, particularly disorders of the prostate, can be treated by administration of prostate cancer antigen polypeptides (e.g., such as, for example, the complete prostate cancer antigen polypeptide, the soluble form of the extracellular domain of a prostate cancer antigen polypeptide, or cells expressing the complete protein) or antagonist (e.g., an antagonistic prostate cancer antigen antibody). Thus, the invention also provides a method of treatment of an individual in need of an decreased level of prostate cancer antigen activity comprising administering to such an individual a pharmaceutical composition comprising an amount of an isolated prostate cancer antigen polypeptide of the invention, or antagonist thereof (e.g., an antagonistic anti-prostate cancer antigen antibody), effective to decrease the prostate cancer antigen activity level in such an individual.

[0460] More generally, polynucleotides, translation products and antibodies corresponding to this gene may be useful for the diagnosis, prognosis, prevention, and/or treatment of diseases and/or disorders associated with the following systems.

### Reproductive System Disorders

[0461] The polynucleotides or polypeptides, or agonists or antagonists of the invention may be used for the diagnosis, treatment, or prevention of diseases and/or disorders of the reproductive system. Reproductive system disorders that can be treated by the compositions of the invention, include, but are not limited to, reproductive system injuries, infections, neoplastic disorders, congenital defects, and diseases or disorders which result in infertility, complications with pregnancy, labor, or parturition, and postpartum difficulties.

[0462] Reproductive system disorders and/or diseases include diseases and/or disorders of the testes, including, but not limited to, testicular atrophy, testicular feminization, cryptorchism (unilateral and bilateral), anorchia, ectopic testis, epididymitis and orchitis (typically resulting from infections such as, for example, gonorrhea, mumps, tuberculosis, and syphilis), testicular torsion, vasitis nodosa, germ cell tumors (e.g., seminomas, embryonal cell carcinomas, teratocarcinomas, choriocarcinomas, yolk sac tumors, and teratomas), stromal tumors (e.g., Leydig cell tumors), hydrocele, hematocele, varicocele, spermatocele, inguinal hernia, and disorders of sperm production (e.g., immotile cilia syndrome, aspermia, asthenozoospermia, azoospermia, oligospermia, and teratozoospermia).

[0463] Reproductive system disorders also include, but are not limited to, disorders of the prostate gland, such as acute non-bacterial prostatitis, chronic non-bacterial prostatitis, acute bacterial prostatitis, chronic bacterial prostatitis, prostatodystonia, prostatosis, granulomatous prostatitis, malacoplakia, benign prostatic hypertrophy or hyperplasia, and prostate neoplastic disorders, including adenocarcinomas, transitional cell carcinomas, ductal carcinomas, and squamous cell carcinomas.

[0464] Additionally, the compositions of the invention may be useful in the diagnosis, treatment, and/or prevention of disorders or diseases of the penis and urethra, including, but not limited to, inflammatory disorders, such as balanoposthitis, balanitis xerotica obliterans, phimosis, paraphimosis, syphilis, herpes simplex virus, gonorrhea, non-gonococcal urethritis, chlamydia, mycoplasma, trichomonas, HIV, AIDS, Reiter's syndrome, condyloma acuminatum, condyloma latum, and pearly penile papules; urethral abnormalities, such as hypospadias, epispadias, and phimosis; premalignant lesions, including Erythroplasia of Queyrat, Bowen's disease, Bowenoid paplosis, giant condyloma of Buscke-Lowenstein, and varrucous carcinoma; penile cancers, including squamous cell carcinomas, carcinoma in situ, verrucous carcinoma, and disseminated penile carcinoma; urethral neoplastic disorders, including penile urethral carcinoma, bulbomembranous urethral carcinoma, and prostatic urethral carcinoma; and erectile disorders, such as priapism, Peyronie's disease, erectile dysfunction, and impotence.

[0465] Moreover, diseases and/or disorders of the vas deferens include, but are not limited to, vasculititis and CBAVD (congenital bilateral absence of the vas deferens); additionally, the polynucleotides, polypeptides, and agonists or antagonists of the present invention may be used in the diagnosis, treatment, and/or prevention of diseases and/or disorders of the seminal vesicles, including but not limited to, hydatid disease, congenital chloride diarrhea, and polycystic kidney disease.

[0466] Other disorders and/or diseases of the male reproductive system that may be diagnosed, treated, and/or prevented with the compositions of the invention include, but are not limited to, Klinefelter's syndrome, Young's syndrome, premature ejaculation, diabetes mellitus, cystic fibrosis, Kartagener's syndrome, high fever, multiple sclerosis, and gynecomastia.

[0467] Further, the polynucleotides, polypeptides, and agonists or antagonists of the present invention may be used in the diagnosis, treatment, and/or prevention of diseases and/or disorders of the vagina and vulva, including, but not limited to, bacterial vaginosis, candida vaginitis, herpes simplex virus, chancroid, granuloma inguinale, lymphogranuloma venereum, scabies, human papillomavirus, vaginal trauma, vulvar trauma, adenosis, chlamydia vaginitis, gonorrhea, trichomonas vaginitis, condyloma acuminatum, syphilis, molluscum contagiosum, atrophic vaginitis, Paget's disease, lichen sclerosus, lichen planus, vulvodynia, toxic shock syndrome, vaginismus, vulvovaginitis, vulvar vestibulitis, and neoplastic disorders, such as squamous cell hyperplasia, clear cell carcinoma, basal cell carcinoma, melanomas, cancer of Bartholin's gland, and vulvar intraepithelial neoplasia.

[0468] Disorders and/or diseases of the uterus that may be diagnosed, treated, and/or prevented with the compositions of the invention include, but are not limited to, dysmenorrhea, retroverted uterus, endometriosis, fibroids, adenomyosis, anovulatory bleeding, amenorrhea, Cushing's syndrome, hydatidiform moles, Asherman's syndrome, premature menopause, precocious puberty, uterine polyps, dysfunctional uterine bleeding (e.g., due to aberrant hormonal signals), and neoplastic disorders, such as adenocarcinomas, keiomyosarcomas, and sarcomas. Additionally, the polypeptides, polynucleotides, or agonists or antagonists of the invention may be useful as a marker or detector of, as well as in the diagnosis, treatment, and/or prevention of congenital uterine abnormalities, such as bicornuate uterus, septate uterus, simple unicornuate uterus, unicornuate uterus with a noncavitary rudimentary horn, unicornuate uterus with a non-communicating cavitary rudimentary horn, unicornuate uterus with a communicating cavitary horn, arcuate uterus, uterine didelfus, and T-shaped uterus.

[0469] Ovarian diseases and/or disorders that may be diagnosed, treated, and/or prevented with the compositions of the invention include, but are not limited to, anovulation, polycystic ovary syndrome (Stein-Leventhal syndrome), ovarian cysts, ovarian hypofunction, ovarian insensitivity to gonadotropins, ovarian overproduction of androgens, right ovarian vein syndrome, amenorrhea, hirutism, and ovarian cancer (including, but not limited to, primary and secondary cancerous growth, Sertoli-Leydig tumors, endometriod carcinoma of the ovary, ovarian papillary serous adenocarcinoma, ovarian mucinous adenocarcinoma, and Ovarian Krukenberg tumors).

[0470] Cervical diseases and/or disorders that may be diagnosed, treated, and/or prevented with the compositions of the invention include, but are not limited to, cervicitis, chronic cervicitis, mucopurulent cervicitis, cervical dysplasia, cervical polyps, Nabothian cysts, cervical erosion, cervical incompetence, and cervical neoplasms (including, for example, cervical carcinoma, squamous metaplasia, squamous cell carcinoma, adenosquamous cell neoplasia, and columnar cell neoplasia).

[0471] Additionally, diseases and/or disorders of the reproductive system that may be diagnosed, treated, and/or prevented with the compositions of the invention include, but are not limited to, disorders and/or diseases of pregnancy, including miscarriage and stillbirth, such as early abortion, late abortion, spontaneous abortion, induced abortion, therapeutic abortion, threatened abortion, missed abortion, incomplete abortion, complete abortion, habitual abortion, missed abortion, and septic abortion; ectopic pregnancy, anemia, Rh incompatibility, vaginal bleeding during pregnancy, gestational diabetes, intrauterine growth retardation, polyhydramnios, HELLP syndrome, abruptio placentae, placenta previa, hyperemesis, preeclampsia, eclampsia, herpes gestationis, and urticaria of pregnancy. Additionally, the polynucleotides, polypeptides, and agonists or antagonists of the present invention may be used in the diagnosis, treatment, and/or prevention of diseases that can complicate pregnancy, including heart disease, heart failure, rheumatic heart disease, congenital heart disease, mitral valve prolapse, high blood pressure, anemia, kidney disease, infectious disease (e.g., rubella, cytomegalovirus, toxoplasmosis, infectious hepatitis, chlamydia, HIV, AIDS, and genital herpes), diabetes mellitus, Graves' disease, thyroiditis, hypothyroidism, Hashimoto's thyroiditis, chronic active hepatitis, cirrhosis of the liver, primary biliary cirrhosis, asthma, systemic lupus eryematosis, rheumatoid arthritis, myasthenia gravis, idiopathic thrombocytopenic purpura, appendicitis, ovarian cysts, gallbladder disorders,and obstruction of the intestine.

[0472] Complications associated with labor and parturition that may be diagnosed, treated, and/or prevented with the compositions of the invention include, but are not limited to, premature rupture of the membranes, pre-term labor, post-term pregnancy, postmaturity, labor that progresses too slowly, fetal distress (e.g., abnormal heart rate (fetal or maternal), breathing problems, and abnormal fetal position), shoulder dystocia, prolapsed umbilical cord, amniotic fluid embolism, and aberrant uterine bleeding.

[0473] Further, diseases and/or disorders of the postdelivery period, that may be diagnosed, treated, and/or prevented with the compositions of the invention, include, but are not limited to, endometritis, myometritis, parametritis, peritonitis, pelvic thrombophlebitis, pulmonary embolism, endotoxemia, pyelonephritis, saphenous thrombophlebitis, mastitis, cystitis, postpartum hemorrhage, and inverted uterus.

[0474] Other disorders and/or diseases of the female reproductive system that may be diagnosed, treated, and/or prevented by the polynucleotides, polypeptides, and agonists or antagonists of the present invention include, but are not limited to, Turner's syndrome, pseudohermaphroditism, premenstrual syndrome, pelvic inflammatory disease, pelvic congestion (vascular engorgement), frigidity, anorgasmia, dyspareunia, ruptured fallopian tube, and Mittelschmerz.

### Immune Activity

[0475] Polynucleotides, polypeptides, antibodies, and/or agonists or antagonists of the present invention may be useful in treating, preventing, diagnosing and/or prognosing diseases, disorders, and/or conditions of the immune system, by, for example, activating or inhibiting the proliferation, differentiation, or mobilization (chemotaxis) of immune cells. Immune cells develop through a process called hematopoiesis, producing myeloid (platelets, red blood cells, neutrophils, and macrophages) and lymphoid (B and T lymphocytes) cells from pluripotent stem cells. The etiology of these immune diseases, disorders, and/or conditions may be genetic, somatic, such as cancer and some autoimmune diseases, acquired (e.g., by chemotherapy or toxins), or infectious. Moreover, polynucleotides, polypeptides, antibodies, and/or agonists or antagonists of the present invention can be used as a marker or detector of a particular immune system disease or disorder.

[0476] In another embodiment, a polypeptide of the invention, or polynucleotides, antibodies, agonists, oantntagonists corresponding to that polypeptide, may be used to treat diseases and disorders of the immune system and/or to inhibit or enhance an immune response generated by cells associated with the tissue(s) in which the polypeptide of the invention is expressed, including one, two, three, four, five, or more tissues disclosed in Table 1A, column 7 (Tissue Distribution Library Code).

[0477] Polynucleotides, polypeptides, antibodies, and/or agonists or antagonists of the present invention may be useful in treating, preventing, diagnosing, and/or prognosing immunodeficiencies, including both congenital and acquired immunodeficiencies. Examples of B cell immunodeficiencies in which immunoglobulin levels B cell function and/or B cell numbers are decreased include: X-linked agammaglobulinemia (Bruton's disease), X-linked infantile agammaglobulinemia, X-linked immunodeficiency with hyper IgM, non X-linked immunodeficiency with hyper IgM, X-linked lymphoproliferative syndrome (XLP), agammaglobulinemia including congenital and acquired agammaglobulinemia, adult onset agammaglobulinemia, late-onset agammaglobulinemia, dysgammaglobulinemia, hypogammaglobulinemia, unspecified hypogammaglobulinemia, recessive agammaglobulinemia (Swiss type), Selective IgM deficiency, selective IgA deficiency, selective IgG subclass deficiencies, IgG subclass deficiency (with or without IgA deficiency), Ig deficiency with increased IgM, IgG and IgA deficiency with increased IgM, antibody deficiency with normal or elevated Igs, Ig heavy chain deletions, kappa chain deficiency, B cell lymphoproliferative disorder (BLPD), common variable immunodeficiency (CVID), common variable immunodeficiency (CVI) (acquired), and transient hypogammaglobulinemia of infancy.

[0478] In specific embodiments, ataxia-telangiectasia or conditions associated with ataxia-telangiectasia are treated, prevented, diagnosed, and/or prognosing using the polypeptides or polynucleotides of the invention, and/or agonists or antagonists thereof.

[0479] Examples of congenital immunodeficiencies in which T cell and/or B cell function and/or number is decreased include, but are not limited to: DiGeorge anomaly, severe combined immunodeficiencies (SCID) (including, but not limited to, X-linked SCID, autosomal recessive SCID, adenosine deaminase deficiency, purine nucleoside phosphorylase (PNP) deficiency, Class II MHC deficiency (Bare lymphocyte syndrome), Wiskott-Aldrich syndrome, and ataxia telangiectasia), thymic hypoplasia, third and fourth pharyngeal pouch syndrome, 22q11.2 deletion, chronic mucocutaneous candidiasis, natural killer cell deficiency (NK), idiopathic CD4+ T-lymphocytopenia, immunodeficiency with predominant T cell defect (unspecified), and unspecified immunodeficiency of cell mediated immunity.

[0480] In specific embodiments, DiGeorge anomaly or conditions associated with DiGeorge anomaly are treated, prevented, diagnosed, and/or prognosed using polypeptides or polynucleotides of the invention, or antagonists or agonists thereof.

[0481] Other immunodeficiencies that may be treated, prevented, diagnosed, and/or prognosed using polypeptides or polynucleotides of the invention, and/or agonists or antagonists thereof, include, but are not limited to, chronic granulomatous disease, Chediak-Higashi syndrome, myeloperoxidase deficiency, leukocyte glucose-6-phosphate dehydrogenase deficiency, X-linked lymphoproliferative syndrome (XLP), leukocyte adhesion deficiency, complement component deficiencies (including C1, C2, C3, C4, C5, C6, C7, C8 and/or C9 deficiencies), reticular dysgenesis, thymic alymphoplasia-aplasia, immunodeficiency with thymoma, severe congenital leukopenia, dysplasia with immunodeficiency, neonatal neutropenia, short limbed dwarfism, and Nezelof syndrome-combined immunodeficiency with Igs.

[0482] In a preferred embodiment, the immunodeficiencies and/or conditions associated with the immunodeficiencies recited above are treated, prevented, diagnosed and/or prognosed using polynucleotides, polypeptides, antibodies, and/or agonists or antagonists of the present invention.

[0483] In a preferred embodiment polynucleotides, polypeptides, antibodies, and/or agonists or antagonists of the present invention could be used as an agent to boost immunoresponsiveness among immunodeficient individuals. In specific embodiments, polynucleotides, polypeptides, antibodies, and/or agonists or antagonists of the present invention could be used as an agent to boost immunoresponsiveness among B cell and/or T cell immunodeficient individuals.

[0484] The polynucleotides, polypeptides, antibodies, and/or agonists or antagonists of the present invention may be useful in treating, preventing, diagnosing and/or prognosing autoimmune disorders. Many autoimmune disorders result from inappropriate recognition of self as foreign material by immune cells. This inappropriate recognition results in an immune response leading to the destruction of the host tissue. Therefore, the administration of polynucleotides and polypeptides of the invention that can inhibit an immune response, particularly the proliferation, differentiation, or chemotaxis of T-cells, may be an effective therapy in preventing autoimmune disorders.

[0485] Autoimmune diseases or disorders that may be treated, prevented, diagnosed and/or prognosed by polynucleotides, polypeptides, antibodies, and/or agonists or antagonists of the present invention include, but are not limited to, one or more of the following: systemic lupus erythematosus, rheumatoid arthritis, ankylosing spondylitis, multiple sclerosis, autoimmune thyroiditis, Hashimoto's thyroiditis, autoimmune hemolytic anemia, hemolytic anemia, thrombocytopenia, autoimmune thrombocytopenia purpura, autoimmune neonatal thrombocytopenia, idiopathic thrombocytopenia purpura, purpura (e.g., Henloch-Scoenlein purpura), autoimmunocytopenia, Goodpasture's syndrome, Pemphigus vulgaris, myasthenia gravis, Grave's disease (hyperthyroidism), and insulin-resisiant diabetes mellitus.

[0486] Additional disorders that are likely to have an autoimmune component that may be treated, prevented, and/or diagnosed with the compositions of the invention include, but are not limited to, type II collagen-induced arthritis, antiphospholipid syndrome, dermatitis, allergic encephalomyelitis, myocarditis, relapsing polychondritis, rheumatic heart disease, neuritis, uveitis ophthalmia, polyendocrinopathies, Reiter's Disease, Stiff-Man Syndrome, autoimmune pulmonary inflammation, autism, Guillain-Barre Syndrome, insulin dependent diabetes mellitus, and autoimmune inflammatory eye disorders.

[0487] Additional disorders that are likely to have an autoimmune component that may be treated, prevented, diagnosed and/or prognosed with the compositions of the invention include, but are not limited to, scleroderma with anti-collagen antibodies (often characterized, e.g., by nucleolar and other nuclear antibodies), mixed connective tissue disease (often characterized, e.g., by antibodies to extractable nuclear antigens (e.g., ribonucleoprotein)), polymyositis (often characterized, e.g., by nonhistone ANA), pernicious anemia (often characterized, e.g.; by antiparietal cell, microsomes, and intrinsic factor antibodies), idiopathic Addison's disease (often characterized, e.g., by humoral and cell-mediated adrenal cytotoxicity, infertility (often characterized, e.g., by antispermatozoal antibodies), glomerulonephritis (often characterized, e.g., by glomerular basement membrane antibodies or immune complexes), bullous pemphigoid (often characterized, e.g., by IgG and complement in basement membrane), Sjogren's syndrome (often characterized, e.g., by multiple tissue antibodies, and/or a specific nonhistone ANA (SS-B)), diabetes mellitus (often characterized, e.g., by cell-mediated and humoral islet cell antibodies), and adrenergic drug resistance (including adrenergic drug resistance with asthma or cystic fibrosis) (often characterized, e.g., by beta-adrenergic receptor antibodies).

[0488] Additional disorders that may have an autoimmune component that may be treated, prevented, diagnosed and/or prognosed with the compositions of the invention include, but are not limited to, chronic active hepatitis (often characterized, e.g., by smooth muscle antibodies), primary biliary cirrhosis (often characterized, e.g., by mitochondria antibodies), other endocrine gland failure (often characterized, e.g., by specific tissue antibodies in some cases), vitiligo (often characterized, e.g., by melanocyte antibodies), vasculitis (often characterized, e.g., by Ig and complement in vessel walls and/or low serum complement), post-MI (often characterized, e.g., by myocardial antibodies), cardiotomy syndrome (often characterized, e.g., by myocardial antibodies), urticaria (often characterized, e.g., by IgG and IgM antibodies to IgE), atopic dermatitis (often characterized, e.g., by IgG and IgM antibodies to IgE), asthma (often characterized, e.g., by IgG and IgM antibodies to IgE), and many other inflammatory, granulomatous, degenerative, and atrophic disorders.

[0489] In a preferred embodiment, the autoimmune diseases and disorders and/or conditions associated with the diseases and disorders recited above are treated, prevented, diagnosed and/or prognosed using for example, antagonists or agonists, polypeptides or polynucleotides, or antibodies of the present invention. In a specific preferred embodiment, rheumatoid arthritis is treated, prevented, and/or diagnosed using polynucleotides, polypeptides, antibodies, and/or agonists or antagonists of the present invention.

[0490] In another specific preferred embodiment, systemic lupus erythematosus is treated, prevented, and/or diagnosed using polynucleotides, polypeptides, antibodies, and/or agonists or antagonists of the present invention. In another specific preferred embodiment, idiopathic thrombocytopenia purpura is treated, prevented, and/or diagnosed using polynucleotides, polypeptides, antibodies, and/or agonists or antagonists of the present invention.

[0491] In another specific preferred embodiment IgA nephropathy is treated, prevented, and/or diagnosed using polynucleotides, polypeptides, antibodies, and/or agonists or antagonists of the present invention.

[0492] In a preferred embodiment, the autoimmune diseases and disorders and/or conditions associated with the diseases and disorders recited above are treated, prevented, diagnosed and/or prognosed using polynucleotides, polypeptides, antibodies, and/or agonists or antagonists of the present invention.

[0493] In preferred embodiments, polypeptides, antibodies, polynucleotides and/or agonists or antagonists of the present invention are used as a immunosuppressive agent(s).

[0494] Polynucleotides, polypeptides, antibodies, and/or agonists or antagonists of the present invention may be useful in treating, preventing, prognosing, and/or diagnosing diseases, disorders, and/or conditions of hematopoietic cells. Polynucleotides, polypeptides, antibodies, and/or agonists or antagonists of the present invention could be used to increase differentiation and proliferation of hematopoietic cells, including the pluripotent stem cells, in an effort to treat or prevent those diseases, disorders, and/or conditions associated with a decrease in certain (or many) types hematopoietic cells, including but not limited to, leukopenia, neutropenia, anemia, and thrombocytopenia. Alternatively, Polynucleotides, polypeptides, antibodies, and/or agonists or antagonists of the present invention could be used to increase differentiation and proliferation of hematopoietic cells, including the pluripotent stem cells, in an effort to treat or prevent those diseases, disorders, and/or conditions associated with an increase in certain (or many) types of hematopoietic cells, including but not limited to, histiocytosis.

[0495] Allergic reactions and conditions, such as asthma (particularly allergic asthma) or other respiratory problems, may also be treated, prevented, diagnosed and/or prognosed using polypeptides, antibodies, or polynucleotides of the invention, and/or agonists or antagonists thereof. Moreover, these molecules can be used to treat, prevent, prognose, and/or diagnose anaphylaxis, hypersensitivity to an antigenic molecule, or blood group incompatibility.

[0496] Additionally, polypeptides or polynucleotides of the invention, and/or agonists or antagonists thereof, may be used to treat, prevent, diagnose and/or prognose IgE-mediated allergic reactions. Such allergic reactions include, but are not limited to, asthma, rhinitis, and eczema. In specific embodiments, polynucleotides, polypeptides, antibodies, and/or agonists or antagonists of the present invention may be used to modulate IgE concentrations in vitro or in vivo.

[0497] Moreover, polynucleotides, polypeptides, antibodies, and/or agonists or antagonists of the present invention have uses in the diagnosis, prognosis, prevention, and/or treatment of inflammatory conditions. For example, since polypeptides, antibodies, or polynucleotides of the invention, and/or agonists or antagonists of the invention may inhibit the activation, proliferation and/or differentiation of cells involved in an inflammatory response, these molecules can be used to prevent and/or treat chronic and acute inflammatory conditions. Such inflammatory conditions include, but are not limited to, for example, inflammation associated with infection (e.g., septic shock, sepsis, or systemic inflammatory response syndrome), ischemia reperfusion injury, endotoxin lethality, complement-mediated hyperacute rejection, nephritis, cytokine or chemokine induced lung injury, inflammatory bowel disease, Crohn's disease, over production of cytokines (e.g., TNF or IL-1.), respiratory disorders (e.g., asthma and allergy); gastrointestinal disorders (e.g., inflammatory bowel disease); cancers (e.g., gastric, ovarian, lung, bladder, liver, and breast); CNS disorders (e.g., multiple sclerosis; ischemic brain injury and/or stroke, traumatic brain injury, neurodegenerative disorders (e.g., Parkinson's disease and Alzheimer's disease); AIDS-related dementia; and prion disease); cardiovascular disorders (e.g., atherosclerosis, myocarditis, cardiovascular disease, and cardiopulmonary bypass complications); as well as many additional diseases, conditions; and disorders that are characterized by inflammation (e.g., hepatitis, rheumatoid arthritis, gout, trauma, pancreatitis, sarcoidosis, dermatitis, renal ischemia-reperfusion injury, Grave's disease, systemic lupus erythematosus, diabetes mellitus, and allogenic transplant rejection).

[0498] Because inflammation is a fundamental defense mechanism, inflammatory disorders can effect virtually any tissue of the body. Accordingly, polynucleotides, polypeptides, and antibodies of the invention, as well as agonists or antagonists thereof, have uses in the treatment of tissue-specific inflammatory disorders, including, but not limited to, adrenalitis, alveolitis, angiocholecystitis, appendicitis, balanitis, blepharitis, bronchitis, bursitis, carditis, cellulitis, cervicitis, cholecystitis, chorditis, cochlitis, colitis, conjunctivitis, cystitis, dermatitis, diverticulitis, encephalitis, endocarditis, esophagitis, eustachitis, fibrositis, folliculitis, gastritis, gastroenteritis, gingivitis, glossitis, hepatosplenitis, keratitis, labyrinthitis, laryngitis, lymphangitis, mastitis, media otitis, meningitis, metritis, mucitis, myocarditis, myosititis, myringitis, nephritis, neuritis, orchitis, osteochondritis, otitis, pericarditis, peritendonitis, peritonitis, pharyngitis, phlebitis, poliomyelitis, prostatitis, pulpitis, retinitis, rhinitis, salpingitis, scleritis, sclerochoroiditis, scrotitis, sinusitis, spondylitis, steatitis, stomatitis, synovitis, syringitis, tendonitis, tonsillitis, urethritis, and vaginitis.

[0499] In specific embodiments, polypeptides, antibodies, or polynucleotides of the invention, and/or agonists or antagonists thereof, are useful to diagnose, prognose, prevent, and/or treat organ transplant rejections and graft-versus-host disease. Organ rejection occurs by host immune cell destruction of the transplanted tissue through an immune response. Similarly, an immune response is also involved in GVHD, but, in this case, the foreign transplanted immune cells destroy the host tissues. Polypeptides, antibodies, or polynucleotides of the invention, and/or agonists or antagonists thereof, that inhibit an immune response, particularly the activation, proliferation, differentiation, or chemotaxis of T-cells, may be an effective therapy in preventing organ rejection or GVHD. In specific embodiments, polypeptides, antibodies, or polynucleotides of the invention, and/or agonists or antagonists thereof, that inhibit an immune response, particularly the activation, proliferation, differentiation, or chemotaxis of T-cells, may be an effective therapy in preventing experimental allergic and hyperacute xenograft rejection.

[0500] In other embodiments, polypeptides, antibodies, or polynucleotides of the invention, and/or agonists or antagonists thereof, are useful to diagnose, prognose, prevent, and/or treat immune complex diseases, including, but not limited to, serum sickness, post streptococcal glomerulonephritis, polyarteritis nodosa, and immune complex-induced vasculitis.

[0501] Polypeptides, antibodies, polynucleotides and/or agonists or antagonists of the invention can be used to treat, detect, and/or prevent infectious agents. For example, by increasing the immune response, particularly increasing the proliferation activation and/or differentiation of B and/or T cells, infectious diseases may be treated, detected, and/or prevented. The immune response may be increased by either enhancing an existing immune response, or by initiating a new immune response. Alternatively, polynucleotides, polypeptides, antibodies, and/or agonists or antagonists of the present invention may also directly inhibit the infectious agent (refer to section of application listing infectious agents, etc.), without necessarily eliciting an immune response.

[0502] In another embodiment, polypeptides, antibodies, polynucleotides and/or agonists or antagonists of the present invention are used as a vaccine adjuvant that enhances immune responsiveness to an antigen. In a specific embodiment, polypeptides, antibodies, polynucleotides and/or agonists or antagonists of the present invention are used as an adjuvant to enhance tumor-specific immune responses.

[0503] In another specific embodiment, polypeptides, antibodies, polynucleotides and/or agonists or antagonists of the present invention are used as an adjuvant to enhance anti-viral immune responses. Anti-viral immune responses that may be enhanced using the compositions of the invention as an adjuvant, include virus and virus associated diseases or symptoms described herein or otherwise known in the art. In specific embodiments, the compositions of the invention are used as an adjuvant to enhance an immune response to a virus, disease, or symptom selected from the group consisting of: AIDS, meningitis, Dengue, EBV, and hepatitis (e.g., hepatitis B). In another specific embodiment, the compositions of the invention are used as an adjuvant to enhance an immune response to a virus, disease, or symptom selected from the group consisting of: HIV/AIDS, respiratory syncytial virus, Dengue, rotavirus, Japanese B encephalitis, influenza A and B, parainfluenza, measles, cytomegalovirus, rabies, Junin, Chikungunya, Rift Valley Fever, herpes simplex, and yellow fever.

[0504] In another specific embodiment, polypeptides, antibodies, polynucleotides and/or agonists or antagonists of the present invention are used as an adjuvant to enhance anti-bacterial or anti-fungal immune responses. Anti-bacterial or anti-fungal immune responses that may be enhanced using the compositions of the invention as an adjuvant, include bacteria or fungus and bacteria or fungus associated diseases or symptoms described herein or otherwise known in the art. In specific embodiments, the compositions of the invention are used as an adjuvant to enhance an immune response to a bacteria or fungus, disease, or symptom selected from the group consisting of: tetanus, Diphtheria, botulism, and meningitis type B.

[0505] In another specific embodiment, the compositions of the invention are used as an adjuvant to enhance an immune response to a bacteria or fungus, disease, or symptom selected from the group consisting of: Vibrio cholerae, Mycobacterium leprae, Salmonella typhi, Salmonella paratyphi, Meisseria meningitidis, Streptococcus pneumoniae, Group B streptococcus, Shigella spp., Enterotoxigenic Escherichia coli, Enterohemorrhagic E. coli, and Borrelia burgdorferi.

[0506] In another specific embodiment, polypeptides, antibodies, polynucleotides and/or agonists or antagonists of the present invention are used as an adjuvant to enhance anti-parasitic immune responses. Anti-parasitic immune responses that may be enhanced using the compositions of the invention as an adjuvant, include parasite and parasite associated diseases or symptoms described herein or otherwise known in the art. In specific embodiments, the compositions of the invention are used as an adjuvant to enhance an immune response to a parasite. In another specific embodiment, the compositions of the invention are used as an adjuvant to enhance an immune response to Plasmodium (malaria) or Leishmania.

[0507] In another specific embodiment, polypeptides, antibodies, polynucleotides and/or agonists or antagonists of the present invention may also be employed to treat infectious diseases including silicosis, sarcoidosis, and idiopathic pulmonary fibrosis; for example, by preventing the recruitment and activation of mononuclear phagocytes.

[0508] In another specific embodiment, polypeptides, antibodies, polynucleotides and/or agonists or antagonists of the present invention are used as an antigen for the generation of antibodies to inhibit or enhance immune mediated responses against polypeptides of the invention.

[0509] In one embodiment, polypeptides, antibodies, polynucleotides and/or agonists or antagonists of the present invention are administered to an animal (e.g., mouse, rat, rabbit, hamster, guinea pig, pigs, micro-pig, chicken, camel, goat, horse, cow, sheep, dog, cat, non-human primate, and human, most preferably human) to boost the immune system to produce increased quantities of one or more antibodies (e.g., IgG, IgA, IgM, and IgE), to induce higher affinity antibody production and immunoglobulin class switching (e.g., IgG, IgA, IgM, and IgE), and/or to increase an immune response.

[0510] In another specific embodiment, polypeptides, antibodies, polynucleotides and/or agonists or antagonists of the present invention are used as a stimulator of B cell responsiveness to pathogens.

[0511] In another specific embodiment, polypeptides, antibodies, polynucleotides and/or agonists or antagonists of the present invention are used as an activator of T cells.

[0512] In another specific embodiment, polypeptides, antibodies, polynucleotides and/or agonists or antagonists of the present invention are used as an agent that elevates the immune status of an individual prior to their receipt of immunosuppressive therapies.

[0513] In another specific embodiment, polypeptides, antibodies, polynucleotides and/or agonists or antagonists of the present invention are used as an agent to induce higher affinity antibodies.

[0514] In another specific embodiment, polypeptides, antibodies, polynucleotides and/or agonists or antagonists of the present invention are used as an agent to increase serum immunoglobulin concentrations.

[0515] In another specific embodiment, polypeptides, antibodies, polynucleotides and/or agonists or antagonists of the present invention are used as an agent to accelerate recovery of immunocompromised individuals.

[0516] In another specific embodiment, polypeptides, antibodies, polynucleotides and/or agonists or antagonists of the present invention are used as an agent to boost immunoresponsiveness among aged populations and/or neonates.

[0517] In another specific embodiment, polypeptides, antibodies, polynucleotides and/or agonists or antagonists of the present invention are used as an immune system enhancer prior to, during, or after bone marrow transplant and/or other transplants (e.g., allogeneic or xenogeneic organ transplantation). With respect to transplantation, compositions of the invention may be administered prior to, concomitant with, and/or after transplantation. In a specific embodiment, compositions of the invention are administered after transplantation, prior to the beginning of recovery of T-cell populations. In another specific embodiment, compositions of the invention are first administered after transplantation after the beginning of recovery of T cell populations, but prior to fill recovery of B cell populations.

[0518] In another specific embodiment, polypeptides, antibodies, polynucleotides and/or agonists or antagonists of the present invention are used as an agent to boost immunoresponsiveness among individuals having an acquired loss of B cell function. Conditions resulting in an acquired loss of B cell function that may be ameliorated or treated by administering the polypeptides, antibodies, polynucleotides and/or agonists or antagonists thereof, include, but are not limited to, HIV Infection, AIDS, bone marrow transplant, and B cell chronic lymphocytic leukemia (CLL).

[0519] In another specific embodiment, polypeptides, antibodies, polynucleotides and/or agonists or antagonists of the present invention are used as an agent to boost immunoresponsiveness among individuals having a temporary immune deficiency. Conditions resulting in a temporary immune deficiency that may be ameliorated or treated by administering the polypeptides, antibodies, polynucleotides and/or agonists or antagonists thereof, include, but are not limited to, recovery from viral infections (e.g., influenza), conditions associated with malnutrition, recovery from infectious mononucleosis, or conditions associated with stress, recovery from measles, recovery from blood transfusion, and recovery from surgery.

[0520] In another specific embodiment, polypeptides, antibodies, polynucleotides and/or agonists or antagonists of the present invention are used as a regulator of antigen presentation by monocytes, dendritic cells, and/or B-cells. In one embodiment, polynucleotides, polypeptides, antibodies, and/or agonists or antagonists of the present invention enhance antigen presentation or antagonizes antigen presentation in vitro or in vivo. Moreover, in related embodiments, said enhancement or antagonism of antigen presentation may be useful as an anti-tumor treatment or to modulate the immune system.

[0521] In another specific embodiment, polypeptides, antibodies, polynucleotides and/or agonists or antagonists of the present invention are used as an agent to direct an individual's immune system towards development of a humoral response (i.e. TH2) as opposed to a TH1 cellular response.

[0522] In another specific embodiment, polypeptides, antibodies, polynucleotides and/or agonists or antagonists of the present invention are used as a means to induce tumor proliferation and thus make it more susceptible to anti-neoplastic agents. For example, multiple myeloma is a slowly dividing disease and is thus refractory to virtually all anti-neoplastic regimens. If these cells were forced to proliferate more rapidly their susceptibility profile would likely change.

[0523] In another specific embodiment, polypeptides, antibodies, polynucleotides and/or agonists or antagonists of the present invention are used as a stimulator of B cell production in pathologies such as AIDS, chronic lymphocyte disorder and/or Common Variable Immunodificiency.

[0524] In another specific embodiment, polypeptides, antibodies, polynucleotides and/or agonists or antagonists of the present invention are used as a therapy for generation and/or regeneration of lymphoid tissues following surgery, trauma or genetic defect. In another specific embodiment, polypeptides, antibodies, polynucleotides and/or agonists or antagonists of the present invention are used in the pretreatment of bone marrow samples prior to transplant.

[0525] In another specific embodiment, polypeptides, antibodies, polynucleotides and/or agonists or antagonists of the present invention are used as a gene-based therapy for genetically inherited disorders resulting in immuno incompetence/immunodeficiency such as observed among SCID patients.

[0526] In another specific embodiment, polypeptides, antibodies, polynucleotides and/or agonists or antagonists of the present invention are used as a means of activating monocytes/macrophages to defend against parasitic diseases that effect monocytes such as Leishmania.

[0527] In another specific embodiment, polypeptides, antibodies, polynucleotides and/or agonists or antagonists of the present invention are used as a means of regulating secreted cytokines that are elicited by polypeptides of the invention.

[0528] In another embodiment, polypeptides, antibodies, polynucleotides and/or agonists or antagonists of the present invention are used in one or more of the applications described herein, as they may apply to veterinary medicine.

[0529] In another specific embodiment, polypeptides, antibodies, polynucleotides and/or agonists or antagonists of the present invention are used as a means of blocking various aspects of immune responses to foreign agents or self. Examples of diseases or conditions in which blocking of certain aspects of immune responses may be desired include autoimmune disorders such as lupus, and arthritis, as well as immunoresponsiveness to skin allergies, inflammation, bowel disease, injury and diseases/disorders associated with pathogens.

[0530] In another specific embodiment, polypeptides, antibodies, polynucleotides and/or agonists or antagonists of the present invention are used as a therapy for preventing the B cell proliferation and Ig secretion associated with autoimmune diseases such as idiopathic thrombocytopenic purpura, systemic lupus erythematosus and multiple sclerosis.

[0531] In another specific embodiment, polypeptides, antibodies, polynucleotides and/or agonists or antagonists of the present invention are used as a inhibitor of B and/or T cell migration in endothelial cells. This activity disrupts tissue architecture or cognate responses and is useful, for example in disrupting immune responses, and blocking sepsis.

[0532] In another specific embodiment, polypeptides, antibodies, polynucleotides and/or agonists or antagonists of the present invention are used as a therapy for chronic hypergammaglobulinemia evident in such diseases as monoclonal gammopathy of undetermined significance (MGUS), Waldenstrom's disease, related idiopathic monoclonal gammopathies, and plasmacytomas.

[0533] In another specific embodiment, polypeptides, antibodies, polynucleotides and/or agonists or antagonists of the present invention may be employed for instance to inhibit polypeptide chemotaxis and activation of macrophages and their precursors, and of neutrophils, basophils, B lymphocytes and some T-cell subsets, e.g., activated and CD8 cytotoxic T cells and natural killer cells, in certain autoimmune and chronic inflammatory and infective diseases. Examples of autoimmune diseases are described herein and include multiple sclerosis, and insulin-dependent diabetes.

[0534] The polypeptides, antibodies, polynucleotides and/or agonists or antagonists of the present invention may also be employed to treat idiopathic hyper-eosinophilic syndrome by, for example, preventing eosinophil production and migration.

[0535] In another specific embodiment, polypeptides, antibodies, polynucleotides and/or agonists or antagonists of the present invention are used to enhance or inhibit complement mediated cell lysis.

[0536] In another specific embodiment, polypeptides, antibodies, polynucleotides and/or agonists or antagonists of the present invention are used to enhance or inhibit antibody dependent cellular cytotoxicity.

[0537] In another specific embodiment, polypeptides, antibodies, polynucleotides and/or agonists or antagonists of the present invention may also be employed for treating atherosclerosis, for example, by preventing monocyte infiltration in the artery wall.

[0538] In another specific embodiment, polypeptides, antibodies, polynucleotides and/or agonists or antagonists of the present invention may be employed to treat adult respiratory distress syndrome (ARDS).

[0539] In another specific embodiment, polypeptides, antibodies, polynucleotides and/or agonists or antagonists of the present invention may be useful for stimulating wound and tissue repair, stimulating angiogenesis, and/or stimulating the repair of vascular or lymphatic diseases or disorders. Additionally, agonists and antagonists of the invention may be used to stimulate the regeneration of mucosal surfaces.

[0540] In a specific embodiment, polynucleotides or polypeptides, and/or agonists thereof are used to diagnose, prognose, treat, and/or prevent a disorder characterized by primary or acquired immunodeficiency, deficient serum immunoglobulin production, recurrent infections, and/or immune system dysfunction. Moreover, polynucleotides or polypeptides, and/or agonists thereof may be used to treat or prevent infections of the joints, bones, skin, and/or parotid glands, blood-borne infections (e.g., sepsis, meningitis, septic arthritis, and/or osteomyelitis), autoimmune diseases (e.g., those disclosed herein), inflammatory disorders, and malignancies, and/or any disease or disorder or condition associated with these infections, diseases, disorders and/or malignancies) including, but not limited to, CVID, other primary immune deficiencies, HIV disease, CLL, recurrent bronchitis, sinusitis, otitis media, conjunctivitis, pneumonia, hepatitis, meningitis, herpes zoster (e.g., severe herpes zoster), and/or pneumocystis carnii. Other diseases and disorders that may be prevented, diagnosed, prognosed, and/or treated with polynucleotides or polypeptides, and/or agonists of the present invention include, but are not limited to, HIV infection, HTLV-BLV infection, lymphopenia, phagocyte bactericidal dysfunction anemia, thrombocytopenia, and hemoglobinuria.

[0541] In another embodiment, polynucleotides, polypeptides, antibodies, and/or agonists or antagonists of the present invention are used to treat, and/or diagnose an individual having common variable immunodeficiency disease (“CVID”; also known as “acquired agammaglobulinemia” and “acquired hypogammaglobulinemia”) or a subset of this disease.

[0542] In a specific embodiment, polynucleotides, polypeptides, antibodies, and/or agonists or antagonists of the present invention may be used to diagnose, prognose, prevent, and/or treat cancers or neoplasms including immune cell or immune tissue-related cancers or neoplasms. Examples of cancers or neoplasms that may be prevented, diagnosed, or treated by polynucleotides, polypeptides, antibodies, and/or agonists or antagonists of the present invention include, but are not limited to, acute myelogenous leukemia, chronic myelogenous leukemia, Hodgkin's disease, non-Hodgkin's lymphoma, acute lymphocytic anemia (ALL) Chronic lymphocyte leukemia, plasmacytomas, multiple myeloma, Burkitt's lymphoma, EBV-transformed diseases, and/or diseases and disorders described in the section entitled “Hyperproliferative Disorders” elsewhere herein.

[0543] In another specific embodiment, polypeptides, antibodies, polynucleotides and/or agonists or antagonists of the present invention are used as a therapy for decreasing cellular proliferation of Large B-cell Lymphomas.

[0544] In another specific embodiment, polypeptides, antibodies, polynucleotides and/or agonists or antagonists of the present invention are used as a means of decreasing the involvement of B cells and Ig associated with Chronic Myelogenous Leukemia.

[0545] In specific embodiments, the compositions of the invention are used as an agent to boost immunoresponsiveness among B cell immunodeficient individuals, such as, for example, an individual who has undergone a partial or complete splenectomy.

[0546] Antagonists of the invention include, for example, binding and/or inhibitory antibodies, antisense nucleic acids, ribozymes or soluble forms of the polypeptides of the present invention (e.g., Fc fusion protein; see, e.g., Example 9). Agonists of the invention include, for example, binding or stimulatory antibodies, and soluble forms of the polypeptides (e.g., Fc fusion proteins; see, e.g., Example 9). Polypeptides, antibodies, polynucleotides and/or agonists or antagonists of the present invention may be employed in a composition with a pharmaceutically acceptable carrier, e.g., as described herein.

[0547] In another embodiment, polypeptides, antibodies, polynucleotides and/or agonists or antagonists of the present invention are administered to an animal (including, but not limited to, those listed above, and also including transgenic animals) incapable of producing functional endogenous antibody molecules or having an otherwise compromised endogenous immune system, but which is capable of producing human immunoglobulin molecules by means of a reconstituted or partially reconstituted immune system from another animal (see, e.g., published PCT Application Nos. WO98/24893, WO/9634096, WO/9633735, and WO/9110741). Administration of polypeptides, antibodies, polynucleotides and/or agonists or antagonists of the present invention to such animals is useful for the generation of monoclonal antibodies against the polypeptides, antibodies, polynucleotides and/or agonists or antagonists of the present invention.

### Blood-Related Disorders

[0548] The polynucleotides, polypeptides, antibodies, and/or agonists or antagonists of the present invention may be used to modulate hemostatic (the stopping of bleeding) or thrombolytic (clot dissolving) activity. For example, by increasing hemostatic or thrombolytic activity, polynucleotides or polypeptides, and/or agonists or antagonists of the present invention could be used to treat or prevent blood coagulation diseases, disorders, and/or conditions (e.g., afibrinogenemia, factor deficiencies, hemophilia), blood platelet diseases, disorders, and/or conditions (e.g., thrombocytopenia), or wounds resulting from trauma, surgery, or other causes. Alternatively, polynucleotides, polypeptides, antibodies, and/or agonists or antagonists of the present invention that can decrease hemostatic or thrombolytic activity could be used to inhibit or dissolve clotting. These molecules could be important in the treatment or prevention of heart attacks (infarction), strokes, or scarring.

[0549] In specific embodiments, the polynucleotides, polypeptides, antibodies, and/or agonists or antagonists of the present invention may be used to prevent, diagnose, prognose, and/or treat thrombosis, arterial thrombosis, venous thrombosis, thromboembolism, pulmonary embolism, atherosclerosis, myocardial infarction, transient ischemic attack, unstable angina. In specific embodiments, the polynucleotides, polypeptides, antibodies, and/or agonists or antagonists of the present invention may be used for the prevention of occulsion of saphenous grafts, for reducing the risk of periprocedural thrombosis as might accompany angioplasty procedures, for reducing the risk of stroke in patients with atrial fibrillation including nonrheumatic atrial fibrillation, for reducing the risk of embolism associated with mechanical heart valves and or mitral valves disease. Other uses for the polynucleotides, polypeptides, antibodies, and/or agonists or antagonists of the present invention, include, but are not limited to, the prevention of occlusions in extrcorporeal devices (e.g., intravascular canulas, vascular access shunts in hemodialysis patients, hemodialysis machines, and cardiopulmonary bypass machines).

[0550] In another embodiment, a polypeptide of the invention, or polynucleotides, antibodies, agonists, or antagonists corresponding to that polypeptide, may be used to prevent, diagnose, prognose, and/or treat diseases and disorders of the blood and/or blood forming organs associated with the tissue(s) in which the polypeptide of the invention is expressed, including one, two, three, four, five, or more tissues disclosed in Table 1A, column 7 (Tissue Distribution Library Code).

[0551] The polynucleotides, polypeptides, antibodies, and/or agonists or antagonists of the present invention may be used to modulate hematopoietic activity (the formation of blood cells). For example, the polynucleotides, polypeptides, antibodies, and/or agonists or antagonists of the present invention may be used to increase the quantity of all or subsets of blood cells, such as, for example, erythrocytes, lymphocytes (B or T cells), myeloid cells (e.g., basophils, eosinophils, neutrophils, mast cells, macrophages) and platelets. The ability to decrease the quantity of blood cells or subsets of blood cells may be useful in the prevention, detection, diagnosis and/or treatment of anemias and leukopenias described below. Alternatively, the polynucleotides, polypeptides, antibodies, and/or agonists or antagonists of the present invention may be used to decrease the quantity of all or subsets of blood cells, such as, for example, erythrocytes, lymphocytes (B or T cells), myeloid cells (e.g., basophils, eosinophils, neutrophils, mast cells, macrophages) and platelets. The ability to decrease the quantity of blood cells or subsets of blood cells may be useful in the prevention, detection, diagnosis and/or treatment of leukocytoses, such as, for example eosinophilia.

[0552] The polynucleotides, polypeptides, antibodies, and/or agonists or antagonists of the present invention may be used to prevent, treat, or diagnose blood dyscrasia.

[0553] Anemias are conditions in which the number of red blood cells or amount of hemoglobin (the protein that carries oxygen) in them is below normal. Anemia may be caused by excessive bleeding, decreased red blood cell production, or increased red blood cell destruction (hemolysis). The polynucleotides, polypeptides, antibodies, and/or agonists or antagonists of the present invention may be useful in treating, preventing, and/or diagnosing anemias. Anemias that may be treated prevented or diagnosed by the polynucleotides, polypeptides, antibodies, and/or agonists or antagonists of the present invention include iron deficiency anemia, hypochromic anemia, microcytic anemia, chlorosis, hereditary sideroblastic anemia, idiopathic acquired sideroblastic anemia, red cell aplasia, megaloblastic anemia (e.g., pernicious anemia, (vitamin B12 deficiency) and folic acid deficiency anemia), aplastic anemia, hemolytic anemias (e.g., autoimmune helolytic anemia, microangiopathic hemolytic anemia, and paroxysmal nocturnal hemoglobinuria). The polynucleotides, polypeptides, antibodies, and/or agonists or antagonists of the present invention may be useful in treating, preventing, and/or diagnosing anemias associated with diseases including but not limited to, anemias associated with systemic lupus erythematosus, cancers, lymphomas, chronic renal disease, and enlarged spleens. The polynucleotides, polypeptides, antibodies, and/or agonists or antagonists of the present invention may be useful in treating, preventing, and/or diagnosing anemias arising from drug treatments such as anemias associated with methyldopa, dapsone, and/or sulfadrugs. Additionally, rhe polynucleotides, polypeptides, antibodies, and/or agonists or antagonists of the present invention may be useful in treating, preventing, and/or diagnosing anemias associated with abnormal red blood cell architecture including but not limited to, hereditary spherocytosis, hereditary elliptocytosis, glucose-6-phosphate dehydrogenase deficiency, and sickle cell anemia.

[0554] The polynucleotides, polypeptides, antibodies, and/or agonists or antagonists of the present invention may be useful in treating, preventing, and/or diagnosing hemoglobin abnormalities, (e.g., those associated with sickle cell anemia, hemoglobin C disease, hemoglobin S-C disease, and hemoglobin E disease). Additionally, the polynucleotides, polypeptides, antibodies, and/or agonists or antagonists of the present invention may be useful in diagnosing, prognosing, preventing, and/or treating thalassemias, including, but not limited to major and minor forms of alpha-thalassemia and beta-thalassemia.

[0555] In another embodiment, the polynucleotides, polypeptides, antibodies, and/or agonists or antagonists of the present invention may be useful in diagnosing, prognosing, preventing, and/or treating bleeding disorders including, but not limited to, thrombocytopenia (e.g., idiopathic thrombocytopenic purpura, and thrombotic thrombocytopenic purpura), Von Willebrand's disease, hereditary platelet disorders (e.g., storage pool disease such as Chediak-Higashi and Hermansky-Pudlak syndromes, thromboxane A2 dysfunction, thromboasthenia, and Bernard-Soulier syndrome), hemolytic-uremic syndrome, hemophelias such as hemophelia A or Factor VII deficiency and Christmas disease or Factor IX deficiency, Hereditary Hemorhhagic Telangiectsia, also known as Rendu-Osler-Weber syndrome, allergic purpura (Henoch Schonlein purpura) and disseminated intravascular coagulation.

[0556] The effect of the polynucleotides, polypeptides, antibodies, and/or agonists or antagonists of the present invention on the clotting time of blood may be monitored using any of the clotting tests known in the art including, but not limited to, whole blood partial thromboplastin time (PTT), the activated partial thromboplastin time (aPTT), the activated clotting time (ACT), the recalcified activated clotting time, or the Lee-White Clotting time.

[0557] Several diseases and a variety of drugs can cause platelet dysfunction. Thus, in a specific embodiment, the polynucleotides, polypeptides, antibodies, and/or agonists or antagonists of the present invention may be useful in diagnosing, prognosing, preventing, and/or treating acquired platelet dysfunction such as platelet dysfunction accompanying kidney failure, leukemia, multiple myeloma, cirrhosis of the liver, and systemic lupus erythematosus as well as platelet dysfunction associated with drug treatments, including treatment with aspirin, ticlopidine, nonsteroidal anti-inflammatory drugs (used for arthritis, pain, and sprains), and penicillin in high doses.

[0558] In another embodiment, the polynucleotides, polypeptides, antibodies, and/or agonists or antagonists of the present invention may be useful in diagnosing, prognosing, preventing, and/or treating diseases and disorders characterized by or associated with increased or decreased numbers of white blood cells. Leukopenia occurs when the number of white blood cells decreases below normal. Leukopenias include, but are not limited to, neutropenia and lymphocytopenia. An increase in the number of white blood cells compared to normal is known as leukocytosis. The body generates increased numbers of white blood cells during infection. Thus, leukocytosis may simply be a normal physiological parameter that reflects infection. Alternatively, leukocytosis may be an indicator of injury or other disease such as cancer. Leokocytoses, include but are not limited to, eosinophilia, and accumulations of macrophages. In specific embodiments, the polynucleotides, polypeptides, antibodies, and/or agonists or antagonists of the present invention may be useful in diagnosing, prognosing, preventing, and/or treating leukopenia. In other specific embodiments, the polynucleotides, polypeptides, antibodies, and/or agonists or antagonists of the present invention may be useful in diagnosing, prognosing, preventing, and/or treating leukocytosis

[0559] Leukopenia may be a generalized decreased in all types of white blood cells, or may be a specific depletion of particular types of white blood cells. Thus, in specific embodiments, the polynucleotides, polypeptides, antibodies, and/or agonists or antagonists of the present invention may be useful in diagnosing, prognosing, preventing, and/or treating decreases in neutrophil numbers, known as neutropenia. Neutropenias that may be diagnosed, prognosed, prevented, and/or treated by the polynucleotides, polypeptides, antibodies, and/or agonists or antagonists of the present invention include, but are not limited to, infantile genetic agranulocytosis, familial neutropenia, cyclic neutropenia, neutropenias resulting from or associated with dietary deficiencies (e.g., vitamin B 12 deficiency or folic acid deficiency), neutropenias resulting from or associated with drug treatments (e.g., antibiotic regimens such as penicillin treatment, sulfonamide treatment, anticoagulant treatment, anticonvulsant drugs, anti-thyroid drugs, and cancer chemotherapy), and neutropenias resulting from increased neutrophil destruction that may occur in association with some bacterial or viral infections, allergic disorders, autoimmune diseases, conditions in which an individual has an enlarged spleen (e.g., Felty syndrome, malaria and sarcoidosis), and some drug treatment regimens.

[0560] The polynucleotides, polypeptides, antibodies, and/or agonists or antagonists of the present invention may be useful in diagnosing, prognosing, preventing, and/or treating lymphocytopenias (decreased numbers of B and/or T lymphocytes), including, but not limited lymphocytopenias resulting from or associated with stress, drug treatments (e.g., drug treatment with corticosteroids, cancer chemotherapies, and/or radiation therapies), AIDS infection and/or other diseases such as, for example, cancer, rheumatoid arthritis, systemic lupus erythematosus, chronic infections, some viral infections and/or hereditary disorders (e.g., DiGeorge syndrome, Wiskott-Aldrich Syndrome, severe combined immunodeficiency, ataxia telangiectsia).

[0561] The polynucleotides, polypeptides, antibodies, and/or agonists or antagonists of the present invention may be useful in diagnosing, prognosing, preventing, and/or treating diseases and disorders associated with macrophage numbers and/or macrophage function including, but not limited to, Gaucher's disease, Niemann-Pick disease, Letterer-Siwe disease and Hand-Schuller-Christian disease.

[0562] In another embodiment, the polynucleotides, polypeptides, antibodies, and/or agonists or antagonists of the present invention may be useful in diagnosing, prognosing, preventing, and/or treating diseases and disorders associated with eosinophil numbers and/or eosinophil function including, but not limited to, idiopathic hypereosinophilic syndrome, eosinophilia-myalgia syndrome, and Hand-Schuller-Christian disease.

[0563] In yet another embodiment, the polynucleotides, polypeptides, antibodies, and/or agonists or antagonists of the present invention may be useful in diagnosing, prognosing, preventing, and/or treating leukemias and lymphomas including, but not limited to, acute lymphocytic (lymphpblastic) leukemia (ALL), acute myeloid (myelocytic, myelogenous, myeloblastic, or myelomonocytic) leukemia, chronic lymphocytic leukemia (e.g., B cell leukemias, T cell leukemias, Sezary syndrome, and Hairy cell leukenia), chronic myelocytic (myeloid, myelogenous, or granulocytic) leukemia, Hodgkin's lymphoma, non-hodgkin's lymphoma, Burkitt's lymphoma, and mycosis fungoides.

[0564] In other embodiments, the polynucleotides, polypeptides, antibodies, and/or agonists or antagonists of the present invention may be useful in diagnosing, prognosing, preventing, and/or treating diseases and disorders of plasma cells including, but not limited to, plasma cell dyscrasias, monoclonal gammaopathies, monoclonal gammopathies of undetermined significance, multiple myeloma, macroglobulinemia, Waldenstrom's macroglobulinemia, cryoglobulinemia, and Raynaud's phenomenon.

[0565] In other embodiments, the polynucleotides, polypeptides, antibodies, and/or agonists or antagonists of the present invention may be useful in treating, preventing, and/or diagnosing myeloproliferative disorders, including but not limited to, polycythemia vera, relative polycythemia, secondary polycythemia, myelofibrosis, acute myelofibrosis, agnogenic myelod metaplasia, thrombocythemia, (including both primary and seconday thrombocythemia) and chronic myelocytic leukemia.

[0566] In other embodiments, the polynucleotides, polypeptides, antibodies, and/or agonists or antagonists of the present invention may be useful as a treatment prior to surgery, to increase blood cell production.

[0567] In other embodiments, the polynucleotides, polypeptides, antibodies, and/or agonists or antagonists of the present invention may be useful as an agent to enhance the migration, phagocytosis, superoxide production, antibody dependent cellular cytotoxicity of neutrophils, eosionophils and macrophages.

[0568] In other embodiments, the polynucleotides, polypeptides, antibodies, and/or agonists or antagonists of the present invention may be useful as an agent to increase the number of stem cells in circulation prior to stem cells pheresis. In another specific embodiment, the polynucleotides, polypeptides, antibodies, and/or agonists or antagonists of the present invention may be useful as an agent to increase the number of stem cells in circulation prior to platelet pheresis.

[0569] In other embodiments, the polynucleotides, polypeptides, antibodies, and/or agonists or antagonists of the present invention may be useful as an agent to increase cytokine production.

[0570] In other embodiments, the polynucleotides, polypeptides, antibodies, and/or agonists or antagonists of the present invention may be useful in preventing, diagnosing, and/or treating primary hematopoietic disorders.

### Hyperproliferative Disorders

[0571] Prostate cancer associated polynucleotides or polypeptides, or agonists or antagonists thereof, can be used to treat, prevent, diagnose and/or prognose hyperproliferative diseases, disorders, and/or conditions, including neoplasms.

[0572] In a specific embodiment, prostate cancer associated polynucleotides or polypeptides, or agonists or antagonists thereof, can be used to treat, prevent, and/or diagnose hyperproliferative diseases, disorders, and/or conditions of the prostate.

[0573] In a preferred embodiment, prostate cancer associated polynucleotides or polypeptides, or agonists or antagonists thereof, can be used to treat, prevent, and/or diagnose prostate neoplasms.

[0574] Prostate cancer associated polynucleotides or polypeptides, or agonists or antagonists of the invention, may inhibit the proliferation of the disorder through direct or indirect interactions. Alternatively, prostate cancer associated polynucleotides or polypeptides, or agonists or antagonists thereof, may proliferate other cells, which can inhibit the hyperproliferative disorder.

[0575] For example, by increasing an immune response, particularly increasing antigenic qualities of the hyperproliferative disorder or by proliferating, differentiating, or mobilizing T-cells, hyperproliferative diseases, disorders, and/or conditions can be treated, prevented, and/or diagnosed. This immune response may be increased by either enhancing an existing immune response, or by initiating a new immune response. Alternatively, decreasing an immune response may also be a method of treating, preventing, and/or diagnosing hyperproliferative diseases, disorders, and/or conditions, such as a chemotherapeutic agent.

[0576] Examples of hyperproliferative diseases, disorders, and/or conditions that can be treated, prevented, and/or diagnosed by prostate cancer associated polynucleotides or polypeptides, or agonists or antagonists thereof, include, but are not limited to neoplasms located in the: prostate, colon, abdomen, bone, breast, digestive system, liver, pancreas, peritoneum, endocrine glands (adrenal, parathyroid, pituitary, testicles, ovary, thymus, thyroid), eye, head and neck, nervous (central and peripheral), lymphatic system, pelvic, skin, soft tissue, spleen, thoracic, and urogenital.

[0577] Similarly, other hyperproliferative disorders can also be treated or detected by polynucleotides or polypeptides, or agonists or antagonists of the present invention. Examples of such hyperproliferative disorders include, but are not limited to: Acute Childhood Lymphoblastic Leukemia, Acute Lymphoblastic Leukemia, Acute Lymphocytic Leukemia, Acute Myeloid Leukemia, Adrenocortical Carcinoma, Adult (Primary) Hepatocellular Cancer, Adult (Primary) Liver Cancer, Adult Acute Lymphocytic Leukemia, Adult Acute Myeloid Leukemia, Adult Hodgkin's Disease, Adult Hodgkin's Lymphoma, Adult Lymphocytic Leukemia, Adult Non-Hodgkin's Lymphoma, Adult Primary Liver Cancer, Adult Soft Tissue Sarcoma, AIDS-Related Lymphoma, AIDS-Related Malignancies, Anal Cancer, Astrocytoma, Bile Duct Cancer, Bladder Cancer, Bone Cancer, Brain Stem Glioma, Brain Tumors, Breast Cancer, Cancer of the Renal Pelvis and Ureter, Central Nervous System (Primary) Lymphoma, Central Nervous System Lymphoma, Cerebellar Astrocytoma, Cerebral Astrocytoma, Cervical Cancer, Childhood (Primary) Hepatocellular Cancer, Childhood (Primary) Liver Cancer, Childhood Acute Lymphoblastic Leukemia, Childhood Acute Myeloid Leukemia, Childhood Brain Stem Glioma, Childhood Cerebellar Astrocytoma, Childhood Cerebral Astrocytoma, Childhood Extracranial Germ Cell Tumors, Childhood Hodgkin's Disease, Childhood Hodgkin's Lymphoma, Childhood Hypothalamic and Visual Pathway Glioma, Childhood Lymphoblastic Leukemia, Childhood Medulloblastoma, Childhood Non-Hodgkin's Lymphoma, Childhood Pineal and Supratentorial Primitive Neuroectodermal Tumors, Childhood Primary Liver Cancer, Childhood Rhabdomyosarcoma, Childhood Soft Tissue Sarcoma, Childhood Visual Pathway and Hypothalamic Glioma, Chronic Lymphocytic Leukemia, Chronic Myelogenous Leukemia, Colon Cancer, Cutaneous T-Cell Lymphoma, Endocrine Pancreas Islet Cell Carcinoma, Endometrial Cancer, Ependymoma, Epithelial Cancer, Esophageal Cancer, Ewing's Sarcoma and Related Tumors, Exocrine Pancreatic Cancer, Extracranial Germ Cell Tumor, Extragonadal Germ Cell Tumor, Extrahepatic Bile Duct Cancer, Eye Cancer, Female Breast Cancer, Gaucher's Disease, Gallbladder Cancer, Gastric Cancer, Gastrointestinal Carcinoid Tumor, Gastrointestinal Tumors, Germ Cell Tumors, Gestational Trophoblastic Tumor, Hairy Cell Leukemia, Head and Neck Cancer, Hepatocellular Cancer, Hodgkin's Disease, Hodgkin's Lymphoma, Hypergammaglobulinemia, Hypopharyngeal Cancer, Intestinal Cancers, Intraocular Melanoma, Islet Cell Carcinoma, Islet Cell Pancreatic Cancer, Kaposi's Sarcoma, Kidney Cancer, Laryngeal Cancer, Lip and Oral Cavity Cancer, Liver Cancer, Lung Cancer, Lymphoproliferative Disorders, Macroglobulinemia, Male Breast Cancer, Malignant Mesothelioma, Malignant Thymoma, Medulloblastoma, Melanoma, Mesothelioma, Metastatic Occult Primary Squamous Neck Cancer, Metastatic Primary Squamous Neck Cancer, Metastatic Squamous Neck Cancer, Multiple Myeloma, Multiple Myeloma/Plasma Cell Neoplasm, Myelodysplastic Syndrome, Myelogenous Leukemia, Myeloid Leukemia, Myeloproliferative Disorders, Nasal Cavity and Paranasal Sinus Cancer, Nasopharyngeal Cancer, Neuroblastoma, Non-Hodgkin's Lymphoma During Pregnancy, Nonmelanoma Skin Cancer, Non-Small Cell Lung Cancer, Occult Primary Metastatic Squamous Neck Cancer, Oropharyngeal Cancer, Osteo-/Malignant Fibrous Sarcoma, Osteosarcoma/Malignant Fibrous Histiocytoma, Osteosarcoma/Malignant Fibrous Histiocytoma of Bone, Ovarian Epithelial Cancer, Ovarian Germ Cell Tumor, Ovarian Low Malignant Potential Tumor, Pancreatic Cancer, Paraproteinemias, Purpura, Parathyroid Cancer, Penile Cancer, Pheochromocytoma, Pituitary Tumor, Plasma Cell Neoplasm/Multiple Myeloma, Primary Central Nervous System Lymphoma, Primary Liver Cancer, Prostate Cancer, Rectal Cancer, Renal Cell Cancer, Renal Pelvis and Ureter Cancer, Retinoblastoma, Rhabdomyosarcoma, Salivary Gland Cancer, Sarcoidosis Sarcomas, Sezary Syndrome, Skin Cancer, Small Cell Lung Cancer, Small Intestine Cancer, Soft Tissue Sarcoma, Squamous Neck Cancer, Stomach Cancer, Supratentorial Primitive Neuroectodermal and Pineal Tumors, T-Cell Lymphoma, Testicular Cancer, Thymoma, Thyroid Cancer, Transitional Cell Cancer of the Renal Pelvis and Ureter, Transitional Renal Pelvis and Ureter Cancer, Trophoblastic Tumors, Ureter and Renal Pelvis Cell Cancer, Urethral Cancer, Uterine Cancer, Uterine Sarcoma, Vaginal Cancer, Visual Pathway and Hypothalamic Glioma, Vulvar Cancer, Waldenstrom's Macroglobulinemia, Wilms'Tumor, and any other hyperproliferative disease, besides neoplasia, located in an organ system listed above.

[0578] In another preferred embodiment, polynucleotides or polypeptides, or agonists or antagonists of the present invention are used to diagnose, prognose, prevent, and/or treat premalignant conditions and to prevent progression to a neoplastic or malignant state, including but not limited to those disorders described above. Such uses are indicated in conditions known or suspected of preceding progression to neoplasia or cancer, in particular, where non-neoplastic cell growth consisting of hyperplasia, metaplasia, or most particularly, dysplasia has occurred (for review of such abnormal growth conditions, see Robbins and Angell, 1976, Basic Pathology, 2d Ed., W. B. Saunders Co., Philadelphia, pp. 68-79.)

[0579] Hyperplasia is a form of controlled cell proliferation, involving an increase in cell number in a tissue or organ, without significant alteration in structure or function. Hyperplastic disorders which can be diagnosed, prognosed, prevented, and/or treated with compositions of the invention (including polynucleotides, polypeptides, agonists or antagonists) include, but are not limited to, angiofollicular mediastinal lymph node hyperplasia, angiolymphoid hyperplasia with eosinophilia, atypical melanocytic hyperplasia, basal cell hyperplasia, benign giant lymph node hyperplasia, cementum hyperplasia, congenital adrenal hyperplasia, congenital sebaceous hyperplasia, cystic hyperplasia, cystic hyperplasia of the breast, denture hyperplasia, ductal hyperplasia, endometrial hyperplasia, fibromuscular hyperplasia, focal epithelial hyperplasia, gingival hyperplasia, inflammatory fibrous hyperplasia, inflammatory papillary hyperplasia, intravascular papillary endothelial hyperplasia, nodular hyperplasia of prostate, nodular regenerative hyperplasia, pseudoepitheliomatous hyperplasia, senile sebaceous hyperplasia, and verrucous hyperplasia.

[0580] Metaplasia is a form of controlled cell growth in which one type of adult or fully differentiated cell substitutes for another type of adult cell. Metaplastic disorders which can be diagnosed, prognosed, prevented, and/or treated with compositions of the invention (including polynucleotides, polypeptides, agonists or antagonists) include, but are not limited to, agnogenic myeloid metaplasia, apocrine metaplasia, atypical metaplasia, autoparenchymatous metaplasia, connective tissue metaplasia, epithelial metaplasia, intestinal metaplasia, metaplastic anemia, metaplastic ossification, metaplastic polyps, myeloid metaplasia, primary myeloid metaplasia, secondary myeloid metaplasia, squamous metaplasia, squamous metaplasia of amnion, and symptomatic myeloid metaplasia.

[0581] Dysplasia is frequently a forerunner of cancer, and is found mainly in the epithelia; it is the most disorderly form of non-neoplastic cell growth, involving a loss in individual cell uniformity and in the architectural orientation of cells. Dysplastic cells often have abnormally large, deeply stained nuclei, and exhibit pleomorphism. Dysplasia characteristically occurs where there exists chronic irritation or inflammation. Dysplastic disorders which can be diagnosed, prognosed, prevented, and/or treated with compositions of the invention (including polynucleotides, polypeptides, agonists or antagonists) include, but are not limited to, anhidrotic ectodermal dysplasia, anterofacial dysplasia, asphyxiating thoracic dysplasia, atriodigital dysplasia, bronchopulmonary dysplasia, cerebral dysplasia, cervical dysplasia, chondroectodermal dysplasia, cleidocranial dysplasia, congenital ectodermal dysplasia, craniodiaphysial dysplasia, craniocarpotarsal dysplasia, craniometaphysial dysplasia, dentin dysplasia, diaphysial dysplasia, ectodermal dysplasia, enamel dysplasia, encephalo-ophthalmic dysplasia, dysplasia epiphysialis hemimelia, dysplasia epiphysialis multiplex, dysplasia epiphysialis punctata, epithelial dysplasia, faciodigitogenital dysplasia, familial fibrous dysplasia of jaws, familial white folded dysplasia, fibromuscular dysplasia, fibrous dysplasia of bone, florid osseous dysplasia, hereditary renal-retinal dysplasia, hidrotic ectodermal dysplasia, hypohidrotic ectodermal dysplasia, lymphopenic thymic dysplasia, mammary dysplasia, mandibulofacial dysplasia, metaphysial dysplasia, Mondini dysplasia, monostotic fibrous dysplasia, mucoepithelial dysplasia, multiple epiphysial dysplasia, oculoauriculovertebral dysplasia, oculodentodigital dysplasia, oculovertebral dysplasia, odontogenic dysplasia, ophthalmomandibulomelic dysplasia, periapical cemental dysplasia, polyostotic fibrous dysplasia, pseudoachondroplastic spondyloepiphysial dysplasia, retinal dysplasia, septo-optic dysplasia, spondyloepiphysial dysplasia, and ventriculoradial dysplasia.

[0582] Additional pre-neoplastic disorders which can be diagnosed, prognosed, prevented, and/or treated with compositions of the invention (including polynucleotides, polypeptides, agonists or antagonists) include, but are not limited to, benign dysproliferative disorders (e.g., benign tumors, fibrocystic conditions, tissue hypertrophy, intestinal polyps, colon polyps, and esophageal dysplasia), leukoplakia, keratoses, Bowen's disease, Farmer's Skin, solar cheilitis, and solar keratosis.

[0583] In another embodiment, a polypeptide of the invention, or polynucleotides, antibodies, agonists, or antagonists corresponding to that polypeptide, may be used to diagnose and/or prognose disorders associated with the tissue(s) in which the polypeptide of the invention is expressed, including one, two, three, four, five, or more tissues disclosed in Table 1A, 7 (Tissue Distribution Library Code).

[0584] In another embodiment, polynucleotides, polypeptides, antibodies, and/or agonists or antagonists of the present invention conjugated to a toxin or a radioactive isotope, as described herein, may be used to treat cancers and neoplasms, including, but not limited to those described herein. In a further preferred embodiment, polynucleotides, polypeptides, antibodies, and/or agonists or antagonists of the present invention conjugated to a toxin or a radioactive isotope, as described herein, may be used to treat acute myelogenous leukemia.

[0585] Additionally, polynucleotides, polypeptides, and/or agonists or antagonists of the invention may affect apoptosis, and therefore, would be useful in treating a number of diseases associated with increased cell survival or the inhibition of apoptosis. For example, diseases associated with increased cell survival or the inhibition of apoptosis that could be diagnosed, prognosed, prevented, and/or treated by polynucleotides, polypeptides, and/or agonists or antagonists of the invention, include cancers (such as follicular lymphomas, carcinomas with p53 mutations, and hormone-dependent tumors, including, but not limited to colon cancer, cardiac tumors, pancreatic cancer, melanoma, retinoblastoma, glioblastoma, lung cancer, intestinal cancer, testicular cancer, stomach cancer, neuroblastoma, myxoma, myoma, lymphoma, endothelioma, osteoblastoma, osteoclastoma, osteosarcoma, chondrosarcoma, adenoma, breast cancer, prostate cancer, Kaposi's sarcoma and ovarian cancer); autoimmune disorders such as, multiple sclerosis, Sjogren's syndrome, Hashimoto's thyroiditis, biliary cirrhosis, Behcet's disease, Crohn's disease, polymyositis, systemic lupus erythematosus and immune-related glomerulonephritis and rheumatoid arthritis) and viral infections (such as herpes viruses, pox viruses and adenoviruses), inflammation, graft v. host disease, acute graft rejection, and chronic graft rejection.

[0586] In preferred embodiments, polynucleotides, polypeptides, and/or agonists or antagonists of the invention are used to inhibit growth, progression, and/or metastasis of cancers, in particular those listed above.

[0587] Additional diseases or conditions associated with increased cell survival that could be diagnosed, prognosed, prevented, and/or treated by polynucleotides, polypeptides, and/or agonists or antagonists of the invention, include, but are not limited to, progression, and/or metastases of malignancies and related disorders such as leukemia (including acute leukemias (e.g., acute lymphocytic leukemia, acute myelocytic leukemia (including myeloblastic, promyelocytic, myelomonocytic, monocytic, and erythroleukemia)) and chronic leukemias (e.g., chronic myelocytic (granulocytic) leukemia and chronic lymphocytic leukemia)), polycythemia vera, lymphomas (e.g., Hodgkin's disease and non-Hodgkin's disease), multiple myeloma, Waldenstrom's macroglobulinemia, heavy chain disease, and solid tumors including, but not limited to, sarcomas and carcinomas such as fibrosarcoma, myxosarcoma, liposarcoma, chondrosarcoma, osteogenic sarcoma, chordoma, angiosarcoma, endotheliosarcoma, lymphangiosarcoma, lymphangioendotheliosarcoma, synovioma, mesothelioma, Ewing's tumor, leiomyosarcoma, rhabdomyosarcoma, colon carcinoma, pancreatic cancer, breast cancer, ovarian cancer, prostate cancer, squamous cell carcinoma, basal cell carcinoma, adenocarcinoma, sweat gland carcinoma, sebaceous gland carcinoma, papillary carcinoma, papillary adenocarcinomas, cystadenocarcinoma, medullary carcinoma, bronchogenic carcinoma, renal cell carcinoma, hepatoma, bile duct carcinoma, choriocarcinoma, seminoma, embryonal carcinoma, Wilm's tumor, cervical cancer, testicular tumor, lung carcinoma, small cell lung carcinoma, bladder carcinoma, epithelial carcinoma, glioma, astrocytoma, medulloblastoma, craniopharyngioma, ependymoma, pinealoma, emangioblastoma, acoustic neuroma, oligodendroglioma, menangioma, melanoma, neuroblastoma, and retinoblastoma.

[0588] Diseases associated with increased apoptosis that could be diagnosed, prognosed, prevented, and/or treated by polynucleotides, polypeptides, and/or agonists or antagonists of the invention, include AIDS; neurodegenerative disorders (such as Alzheimer's disease, Parkinson's disease, amyotrophic lateral sclerosis, retinitis pigmentosa, cerebellar degeneration and brain tumor or prior associated disease); autoimmune disorders (such as, multiple sclerosis, Sjogren's syndrome, Hashimoto's thyroiditis, biliary cirrhosis, Behcet's disease, Crohn's disease, polymyositis, systemic lupus erythematosus and immune-related glomerulonephritis and rheumatoid arthritis) myelodysplastic syndromes (such as aplastic anemia), graft v. host disease, ischemic injury (such as that caused by myocardial infarction, stroke and reperfusion injury), liver injury (e.g., hepatitis related liver injury, ischemia/reperfusion injury, cholestosis (bile duct injury) and liver cancer); toxin-induced liver disease (such as that caused by alcohol), septic shock, cachexia and anorexia.

[0589] Hyperproliferative diseases and/or disorders that could be diagnosed, prognosed, prevented, and/or treated by polynucleotides, polypeptides, and/or agonists or antagonists of the invention, include, but are not limited to, neoplasms located in the liver, abdomen, bone, breast, digestive system, pancreas, peritoneum, endocrine glands (adrenal, parathyroid, pituitary, testicles, ovary, thymus, thyroid), eye, head and neck, nervous system (central and peripheral), lymphatic system, pelvis, skin, soft tissue, spleen, thorax, and urogenital tract.

[0590] Similarly, other hyperproliferative disorders can also be diagnosed, prognosed, prevented, and/or treated by polynucleotides, polypeptides, and/or agonists or antagonists of the invention. Examples of such hyperproliferative disorders include, but are not limited to: hypergammaglobulinemia, lymphoproliferative disorders, paraproteinemias, purpura, sarcoidosis, Sezary Syndrome, Waldenstron's macroglobulinemia, Gaucher's Disease, histiocytosis, and any other hyperproliferative disease, besides neoplasia, located in an organ system listed above.

[0591] One preferred embodiment utilizes polynucleotides of the present invention to inhibit aberrant cellular division, by gene therapy using the present invention, and/or protein fusions or fragments thereof.

[0592] Thus, the present invention provides a method for treating cell proliferative diseases, disorders, and/or conditions by inserting into an abnormally proliferating cell a polynucleotide of the present invention, wherein said polynucleotide represses said cell proliferation, disease, disorder, and/or condition.

[0593] In a preferred embodiment, the present invention provides a method for treating cell proliferative diseases, disorders and/or conditions of the prostate cancer by inserting into a cell, a polynucleotide of the present invention, wherein said polynucleotide represses said cell proliferation, disease and/or disorder.

[0594] Another embodiment of the present invention provides a method of treating cell-proliferative diseases, disorders, and/or conditions in individuals comprising administration of one or more active gene copies of the present invention to an abnormally proliferating cell or cells. In a preferred embodiment, polynucleotides of the present invention is a DNA construct comprising a recombinant expression vector effective in expressing a DNA sequence encoding said polynucleotides. In another preferred embodiment of the present invention, the DNA construct encoding the polynucleotides of the present invention is inserted into cells to be treated utilizing a retrovirus, or more preferably an adenoviral vector (see, e.g., G J. Nabel, et. al., PNAS 96: 324-326 (1999), which is hereby incorporated by reference). In a most preferred embodiment, the viral vector is defective and will not transform non-proliferating cells, only proliferating cells. Moreover, in a preferred embodiment, the polynucleotides of the present invention inserted into proliferating cells either alone, or in combination with or fused to other polynucleotides, can then be modulated via an external stimulus (i.e., magnetic, specific small molecule, chemical, or drug administration, etc.), which acts upon the promoter upstream of said polynucleotides to induce expression of the encoded protein product. As such the beneficial therapeutic affect of the present invention may be expressly modulated (i.e., to increase, decrease, or inhibit expression of the present invention) based upon said external stimulus.

[0595] Polynucleotides of the present invention may be useful in repressing expression of oncogenic genes or antigens. By “repressing expression of the oncogenic genes” is intended the suppression of the transcription of the gene, the degradation of the gene transcript (pre-message RNA), the inhibition of splicing, the destruction of the messenger RNA, the prevention of the post-translational modifications of the protein, the destruction of the protein, or the inhibition of the normal function of the protein.

[0596] For local administration to abnormally proliferating cells, polynucleotides of the present invention may be administered by any method known to those of skill in the art including, but not limited to transfection, electroporation, microinjection of cells, or in vehicles such as liposomes, lipofectin, or as naked polynucleotides, or any other method described throughout the specification. The polynucleotide of the present invention may be delivered by known gene delivery systems such as, but not limited to, retroviral vectors (Gilboa, J. Virology 44:845 (1982); Hocke, Nature 320:275 (1986); Wilson, et al., Proc. Natl. Acad. Sci. U.S.A. 85:3014), vaccinia virus system (Chakrabarty et al., Mol. Cell Biol. 5:3403 (1985) or other efficient DNA delivery systems (Yates et al., Nature 313:812 (1985)) known to those skilled in the art. These references are exemplary only and are hereby incorporated by reference. In order to specifically deliver or transfect cells which are abnormally proliferating and spare non-dividing cells, it is preferable to utilize a retrovirus, or adenoviral (as described in the art and elsewhere herein) delivery system known to those of skill in the art. Since host DNA replication is required for retroviral DNA to integrate and the retrovirus will be unable to self replicate due to the lack of the retrovirus genes needed for its life cycle. Utilizing such a retroviral delivery system for polynucleotides of the present invention will target said gene and constructs to abnormally proliferating cells and will spare the non-dividing normal cells.

[0597] The polynucleotides of the present invention may be delivered directly to cell proliferative disorder/disease sites in internal organs, body cavities and the like by use of imaging devices used to guide an injecting needle directly to the disease site. The polynucleotides of the present invention may also be administered to disease sites at the time of surgical intervention.

[0598] By “cell proliferative disease” is meant any human or animal disease or disorder, affecting any one or any combination of organs, cavities, or body parts, which is characterized by single or multiple local abnormal proliferations of cells, groups of cells, or tissues, whether benign or malignant.

[0599] Any amount of the polynucleotides of the present invention may be administered as long as it has a biologically inhibiting effect on the proliferation of the treated cells. Moreover, it is possible to administer more than one of the polynucleotide of the present invention simultaneously to the same site. By “biologically inhibiting” is meant partial or total growth inhibition as well as decreases in the rate of proliferation or growth of the cells. The biologically inhibitory dose may be determined by assessing the effects of the polynucleotides of the present invention on target malignant or abnormally proliferating cell growth in tissue culture, tumor growth in animals and cell cultures, or any other method known to one of ordinary skill in the art.

[0600] The present invention is further directed to antibody-based therapies which involve administering of anti-polypeptides and anti-polynucleotide antibodies to a mammalian, preferably human, patient for treating one or more of the described diseases, disorders, and/or conditions. Methods for producing anti-polypeptides and anti-polynucleotide antibodies polyclonal and monoclonal antibodies are described in detail elsewhere herein. Such antibodies may be provided in pharmaceutically acceptable compositions as known in the art or as described herein.

[0601] A summary of the ways in which the antibodies of the present invention may be used therapeutically includes binding polynucleotides or polypeptides of the present invention locally or systemically in the body or by direct cytotoxicity of the antibody, e.g., as mediated by complement (CDC) or by effector cells (ADCC). Some of these approaches are described in more detail below. Armed with the teachings provided herein, one of ordinary skill in the art will know how to use the antibodies of the present invention for diagnostic, monitoring or therapeutic purposes without undue experimentation.

[0602] In particular, the antibodies, fragments and derivatives of the present invention are useful for treating a subject having or developing cell proliferative and/or differentiation diseases, disorders, and/or conditions as described herein. Such treatment comprises administering a single or multiple doses of the antibody, or a fragment, derivative, or a conjugate thereof.

[0603] The antibodies of this invention may be advantageously utilized in combination with other monoclonal or chimeric antibodies, or with lymphokines or hematopoietic growth factors, for example, which serve to increase the number or activity of effector cells which interact with the antibodies.

[0604] It is preferred to use high affinity and/or potent in vivo inhibiting and/or neutralizing antibodies against polypeptides or polynucleotides of the present invention, fragments or regions thereof, for both immunoassays directed to and therapy of diseases, disorders, and/or conditions related to polynucleotides or polypeptides, including fragments thereof, of the present invention. Such antibodies, fragments, or regions, will preferably have an affinity for polynucleotides or polypeptides, including fragments thereof. Preferred binding affinities include those with a dissociation constant or Kd less than 5×10⁻⁶M, 10⁻⁶M, 5×10⁻⁷M, 10⁻⁷M, 5×10⁻⁸M, 10⁻⁸M, 5×10⁻⁹M, 10⁻⁹M, 5×10⁻¹⁰M, 10⁻¹⁰M, 5×10⁻¹¹M, 10⁻¹¹M, 5×10⁻¹²M, 10⁻¹²M, 5×10⁻¹³M, 10⁻¹³M, 5×10⁻¹⁴M, 10⁻¹⁴M, 5×10⁻¹⁵M, and 10⁻¹⁵M.

[0605] Moreover, prostate cancer antigen polypeptides of the present invention or fragments thereof, are useful in inhibiting the angiogenesis of proliferative cells or tissues, either alone, as a protein fusion, or in combination with other polypeptides directly or indirectly, as described elsewhere herein. In a most preferred embodiment, said anti-angiogenesis effect may be achieved indirectly, for example, through the inhibition of hematopoietic, tumor-specific cells, such as tumor-associated macrophages (see, e.g., Joseph-I B, et al. J Natl Cancer Inst, 90(21):1648-53 (1998), which is hereby incorporated by reference). Antibodies directed to polypeptides or polynucleotides of the present invention may also result in inhibition of angiogenesis directly, or indirectly (see, e.g., Witte L, et al., Cancer Metastasis Rev. 17(2):155-61 (1998), which is hereby incorporated by reference)).

[0606] Polypeptides, including protein fusions, of the present invention, or fragments thereof may be useful in inhibiting proliferative cells or tissues through the induction of apoptosis. Said polypeptides may act either directly, or indirectly to induce apoptosis of proliferative cells and tissues, for example in the activation of a death-domain receptor, such as tumor necrosis factor (TNF) receptor-1, CD95 (Fas/APO-1), TNF-receptor-related apoptosis-mediated protein (TRAMP) and TNF-related apoptosis-inducing ligand (TRAIL) receptor-1 and -2 (see, e.g., Schulze-Osthoff K, et. al., Eur J Biochem 254(3):439-59 (1998), which is hereby incorporated by reference). Moreover, in another preferred embodiment of the present invention, said polypeptides may induce apoptosis through other mechanisms, such as in the activation of other proteins which will activate apoptosis, or through stimulating the expression of said proteins, either alone or in combination with small molecule drugs or adjuvants, such as apoptonin, galectins, thioredoxins, antiinflammatory proteins (See for example, Mutat. Res. 400(1-2):447-55 (1998), Med Hypotheses.50(5):423-33 (1998), Chem. Biol. Interact. Apr 24;111-112:23-34 (1998), J. Mo. Med. 76(6):402-12 (1998), Int. J. Tissue React. 20(l):3-15 (1998), which are all hereby incorporated by reference).

[0607] Polypeptides, including protein fusions to, or fragments thereof, of the present invention are useful in inhibiting the metastasis of proliferative cells or tissues. Inhibition may occur as a direct result of administering polypeptides, or antibodies directed to said polypeptides as described elsewhere -herein, or indirectly, such as activating the expression of proteins known to inhibit metastasis, for example alpha 4 integrins, (See, e.g., Curr Top Microbiol Immunol 1998;231:125-41, which is hereby incorporated by reference). Such therapeutic affects of the present invention may be achieved either alone, or in combination with small molecule drugs or adjuvants.

[0608] In another embodiment, the invention provides a method of delivering compositions containing the polypeptides of the invention (e.g., compositions containing polypeptides or anti-prostate cancer antigen polypeptide antibodies associated with heterologous polypeptides, heterologous nucleic acids, toxins, or prodrugs) to targeted cells expressing the polypeptide of the present invention. prostate cancer antigen polypeptides or anti-prostate cancer antigen polypeptide antibodies of the invention may be associated with heterologous polypeptides, heterologous nucleic acids, toxins, or prodrugs via hydrophobic, hydrophilic, ionic and/or covalent interactions.

[0609] Polypeptides, protein fusions to, or fragments thereof, of the present invention are useful in enhancing the immunogenicity and/or antigenicity of proliferating cells or tissues, either directly, such as would occur if the polypeptides of the present invention ‘vaccinated’ the immune response to respond to proliferative antigens and immunogens, or indirectly, such as in activating the expression of proteins known to enhance the immune response (e.g. chemokines), to said antigens and immunogens.

### Urinary System Disorders

[0610] Polynucleotides, polypeptides, antibodies, and/or agonists or antagonists of the present invention, may be used to treat, prevent, diagnose, and/or prognose disorders of the urinary system, including but not limited to disorders of the renal system, bladder, ureters, and urethra. Renal disorders include, but are not limited to, kidney failure, nephritis, blood vessel disorders of kidney, metabolic and congenital kidney disorders, urinary disorders of the kidney, autoimmune disorders, sclerosis and necrosis, electrolyte imbalance, and kidney cancers.

[0611] Kidney failure diseases include, but are not limited to, acute kidney failure, chronic kidney failure, atheroembolic renal failure, and end-stage renal disease. Inflammatory diseases of the kidney include acute glomerulonephritis, postinfectious glomerulonephritis, rapidly progressive glomerulonephritis, nephrotic syndrome, membranous glomerulonephritis, familial nephrotic syndrome, membranoproliferative glomerulonephritis I and II, mesangial proliferative glomerulonephritis, chronic glomerulonephritis, acute tubulointerstitial nephritis, chronic tubulointerstitial nephritis, acute post-streptococcal glomerulonephritis (PSGN), pyelonephritis, lupus nephritis, chronic nephritis, interstitial nephritis, and post-streptococcal glomerulonephritis.

[0612] Blood vessel disorders of the kidneys include, but are not limited to, kidney infarction, atheroembolic kidney disease, cortical necrosis, malignant nephrosclerosis, renal vein thrombosis, renal underperfusion, renal ischemia-reperfusion, renal artery embolism, and renal artery stenosis. Kidney disorders resulting form urinary tract problems include, but are not limited to, pyelonephritis, hydronephrosis, urolithiasis (renal lithiasis, nephrolithiasis), reflux nephropathy, urinary tract infections, urinary retention, and acute or chronic unilateral obstructive uropathy.

[0613] Metabolic and congenital disorders of the kidneys include, but are not limited to, renal tubular acidosis, renal glycosuria, nephrogenic diabetes insipidus, cystinuria, Fanconi's syndrome, vitamin D-resistant rickets, Hartnup disease, Bartter's syndrome, Liddle's syndrome, polycystic kidney disease, medullary cystic disease, medullary sponge kidney, Alport's syndrome, nail-patella syndrome, congenital nephrotic syndrome, CRUSH syndrome, horseshoe kidney, diabetic nephropathy, nephrogenic diabetes insipidus, analgesic nephropathy, kidney stones, and membranous nephropathy, Kidney disorders resulting from an autoimmune response include, but are not limited to, systemic lupus erythematosus (SLE), Goodpasture syndrome, IgA nephropathy, and IgM mesangial proliferative glomerulonephritis.

[0614] Sclerotic or necrotic disorders of the kidney include, but are not limited to, glomerulosclerosis, diabetic nephropathy, focal segmental glomerulosclerosis (FSGS), necrotizing glomerulonephritis, and renal papillary necrosis. Kidneys may also develop carcinomas, including, but not limited to, hypernephroma, nephroblastoma, renal cell cancer, transitional cell cancer, squamous cell cancer, and Wilm's tumor.

[0615] Kidney disorders may also result in electrolyte imbalances, including, but not limited to, nephrocalcinosis, pyuria, edema, hydronephritis, proteinuria, hyponatremia, hypernatremia, hypokalemia, hyperkalemia, hypocalcemia, hypercalcemia, hypophosphatemia, and hyperphosphatemia.

[0616] Bladder disorders include, but are not limited to, benign prostatic hyperplasia (BPH), interstitial cystitis (IC), prostatitis, proteinuria, urinary tract infections, urinary incontinence, urinary retention. Disorders of the ureters and urethra include, but are not limited to, acute or chronic unilateral obstructive uropathy. The bladder, ureters, and urethra may also develop carcinomas, including, but not limited to, superficial bladder cancer, invasive bladder cancer, carcinoma of the ureter, and urethra cancers.

[0617] Polypeptides may be administered using any method known in the art, including, but not limited to, direct needle injection at the delivery site, intravenous injection, topical administration, catheter infusion, biolistic injectors, particle accelerators, gelfoam sponge depots, other commercially available depot materials, osmotic pumps, oral or suppositorial solid pharmaceutical formulations, decanting or topical applications during surgery, aerosol delivery. Such methods are known in the art. Polypeptides may be administered as part of a Therapeutic, described in more detail below. Methods of delivering polynucleotides are described in more detail herein.

### Cardiovascular Disorders

[0618] Polynucleotides or polypeptides, or agonists or antagonists of the present invention, may be used to treat, prevent, diagnose, and/or prognose cardiovascular disorders, including, but not limited to, peripheral artery disease, such as limb ischemia.

[0619] Cardiovascular disorders include cardiovascular abnormalities, such as arterio-arterial fistula, arteriovenous fistula, cerebral arteriovenous malformations, congenital heart defects, pulmonary atresia, and Scimitar Syndrome. Congenital heart defects include aortic coarctation, cor triatriatum, coronary vessel anomalies, crisscross heart, dextrocardia, patent ductus arteriosus, Ebstein's anomaly, Eisenmenger complex, hypoplastic left heart syndrome, levocardia, tetralogy of fallot, transposition of great vessels, double outlet right ventricle, tricuspid atresia, persistent truncus arteriosus, total anomalous pulmonary venous connection, hypoplastic left heart syndrome, and heart septal defects, such as aortopulmonary septal defect, endocardial cushion defects, Lutembacher's Syndrome, atrioventricular canal defect, trilogy of Fallot, ventricular heart septal defects.

[0620] Cardiovascular disorders also include heart disease, such as arrhythmias, carcinoid heart disease, high cardiac output, low cardiac output, cardiac tamponade, endocarditis (including bacterial), heart aneurysm, cardiac arrest, sudden cardiac death, congestive heart failure, congestive cardiomyopathy, paroxysmal dyspnea, cardiac edema, heart hypertrophy, congestive cardiomyopathy, left ventricular hypertrophy, right ventricular hypertrophy, post-infarction heart rupture, ventricular septal rupture, heart valve diseases, myocardial diseases, myocardial ischemia, pericardial effusion, pericarditis (including constrictive and tuberculous), pneumopericardium, postpericardiotomy syndrome, pulmonary heart disease, rheumatic heart disease, ventricular dysfunction, hyperemia, cardiovascular pregnancy complications, Scimitar Syndrome, diastolic dysfunction, enlarged heart, heart block, J-curve phenomenon, rheumatic heart disease, Marfan syndrome, cardiovascular syphilis, and cardiovascular tuberculosis.

[0621] Arrhythmias include sinus arrhythmia, atrial fibrillation, atrial flutter, bradycardia, extrasystole, Adams-Stokes Syndrome, bundle-branch block, sinoatrial block, long QT syndrome, parasystole, Lown-Ganong-Levine Syndrome, Mahaim-type pre-excitation syndrome, Wolff-Parkinson-White syndrome, sick sinus syndrome, tachycardias, and ventricular fibrillation. Tachycardias include paroxysmal tachycardia, supraventricular tachycardia, accelerated idioventricular rhythm, atrioventricular nodal reentry tachycardia, ectopic atrial tachycardia, ectopic junctional tachycardia, sinoatrial nodal reentry tachycardia, sinus tachycardia, Torsades de Pointes, and ventricular tachycardia.

[0622] Heart valve disease include aortic valve insufficiency, aortic valve stenosis, heart murmurs, aortic valve prolapse, mitral valve prolapse, tricuspid valve prolapse, mitral valve insufficiency, mitral valve stenosis, pulmonary atresia, pulmonary valve insufficiency, pulmonary valve stenosis, tricuspid atresia, tricuspid valve insufficiency, tricuspid valve stenosis, and bicuspid aortic valve.

[0623] Myocardial diseases include alcoholic cardiomyopathy, congestive cardiomyopathy, hypertrophic cardiomyopathy, aortic subvalvular stenosis, pulmonary subvalvular stenosis, restrictive cardiomyopathy, Chagas cardiomyopathy, endocardial fibroelastosis, endomyocardial fibrosis, Kearns Syndrome, Barth syndrome, myocardial reperfusion injury, and myocarditis.

[0624] Myocardial ischemias include coronary disease, such as angina pectoris, Prinzmetal's angina, unstable angina, coronary aneurysm, coronary arteriosclerosis, coronary thrombosis, coronary vasospasm, myocardial infarction and myocardial stunning.

[0625] Cardiovascular diseases also include vascular diseases such as aneurysms, angiodysplasia, angiomatosis, bacillary angiomatosis, Hippel-Lindau Disease, Klippel-Trenaunay-Weber Syndrome, Sturge-Weber Syndrome, angioneurotic edema, aortic diseases, Takayasu's Arteritis, aortitis, Leriche's Syndrome, arterial occlusive diseases, arteritis, enarteritis, polyarteritis nodosa, cerebrovascular disorders, diabetic angiopathies, diabetic retinopathy, embolisms, thrombosis, erythromelalgia, hemorrhoids, hepatic veno-occlusive disease, hypertension, hypotension (shock), ischemia, peripheral vascular diseases, phlebitis, superficial phlebitis, pulmonary veno-occlusive disease, chronic obstructive pulmonary disease, Buerger's disease, Raynaud's disease, CREST syndrome, retinal vein occlusion, Scimitar syndrome, superior vena cava syndrome, telangiectasia, atacia telangiectasia, hereditary hemorrhagic telangiectasia, deep vein thrombosis, varicocele, varicose veins, varicose ulcer, vasculitis, and venous insufficiency.

[0626] Aneurysms include dissecting aneurysms, false aneurysms, infected aneurysms, ruptured aneurysms, aortic aneurysms, cerebral aneurysms, coronary aneurysms, heart aneurysms, and iliac aneurysms.

[0627] Arterial occlusive diseases include arteriosclerosis, arteriolosclerosis, atherosclerosis, intermittent claudication, carotid stenosis, fibromuscular dysplasias, mesenteric vascular occlusion, Moyamoya disease, renal artery obstruction, retinal artery occlusion, and thromboangiitis obliterans.

[0628] Cerebrovascular disorders include carotid artery diseases, cerebral amyloid angiopathy, cerebral aneurysm, cerebral anoxia, cerebral arteriosclerosis, cerebral arteriovenous malformation, cerebral artery diseases, cerebral embolism and thrombosis, carotid artery thrombosis, sinus thrombosis, Wallenberg's syndrome, cerebral hemorrhage, epidural hematoma, subdural hematoma, subaraxhnoid hemorrhage, cerebral infarction, cerebral ischemia (including transient), subclavian steal syndrome, periventricular leukomalacia, vascular headache, cluster headache, migraine, and vertebrobasilar insufficiency.

[0629] Embolisms include air embolisms, amniotic fluid embolisms, cholesterol embolisms, blue toe syndrome, fat embolisms, pulmonary embolisms, and thromoboembolisms. Thrombosis include coronary thrombosis, hepatic vein thrombosis, deep vein thrombosis, retinal vein occlusion, carotid artery thrombosis, sinus thrombosis, Wallenberg's syndrome, and thrombophlebitis.

[0630] Ischemia includes cerebral ischemia, ischemic colitis, silent ischemia, compartment syndromes, anterior compartment syndrome, myocardial ischemia, reperfusion injuries, and peripheral limb ischemia. Vasculitis includes aortitis, arteritis, Behcet's Syndrome, Churg-Strauss Syndrome, mucocutaneous lymph node syndrome, thromboangiitis obliterans, hypersensitivity vasculitis, Schoenlein-Henoch purpura, allergic cutaneous vasculitis, and Wegener's granulomatosis.

[0631] Cardiovascular diseases can also occur due to electrolyte imbalances that include, but are not limited to hyponatremia, hypernatremia, hypokalemia, hyperkalemia, hypocalcemia, hypercalcemia, hypophosphatemia, and hyperphophatemia. Neoplasm and/or cancers of the cardiovascular system include, but are not limited to, myxomas, fibromas, and rhabdomyomas.

[0632] Polypeptides may be administered using any method known in the art, including, but not limited to, direct needle injection at the delivery site, intravenous injection, topical administration, catheter infusion, biolistic injectors, particle accelerators, gelfoam sponge depots, other commercially available depot materials, osmotic pumps, oral or suppositorial solid pharmaceutical formulations, decanting or topical applications during surgery, aerosol delivery. Such methods are known in the art. Polypeptides may be administered as part of a Therapeutic, described in more detail below. Methods of delivering polynucleotides are described in more detail herein.

### Respiratory Disorders

[0633] Polynucleotides or polypeptides, or agonists or antagonists of the present invention may be used to treat, prevent, diagnose, and/or prognose diseases and/or disorders of the respiratory system.

[0634] Diseases and disorders of the respiratory system include, but are not limited to, nasal vestibulitis, nonallergic rhinitis (e.g., acute rhinitis, chronic rhinitis, atrophic rhinitis, vasomotor rhinitis), nasal polyps, and sinusitis, juvenile angiofibromas, cancer of the nose and juvenile papillomas, vocal cord polyps, nodules (singer's nodules), contact ulcers, vocal cord paralysis, laryngoceles, pharyngitis (e.g.,. viral and bacterial), tonsillitis, tonsillar cellulitis, parapharyngeal abscess, laryngitis, laryngoceles, and throat cancers (e.g., cancer of the nasopharynx, tonsil cancer, larynx cancer), lung cancer (e.g., squamous cell carcinoma, small cell (oat cell) carcinoma, large cell carcinoma, and adenocarcinoma), allergic disorders (eosinophilic pneumonia, hypersensitivity pneumonitis (e.g., extrinsic allergic alveolitis, allergic interstitial pneumonitis, organic dust pneumoconiosis, allergic bronchopulmonary aspergillosis, asthma, Wegener's granulomatosis (granulomatous vasculitis), Goodpasture's syndrome)), pneumonia (e.g., bacterial pneumonia (e.g., Streptococcus pneumoniae (pneumoncoccal pneumonia), Staphylococcus aureus (staphylococcal pneumonia), Gram-negative bacterial pneumonia (caused by, e.g., Klebsiella and Pseudomas spp.), Mycoplasma pneumoniae pneumonia, Hemophilus influenzae pneumonia, Legionella pneumophila (Legionnaires' disease), and Chlamydia psittaci (Psittacosis)), and viral pneumonia (e.g., influenza, chickenpox (varicella).

[0635] Additional diseases and disorders of the respiratory system include, but are not limited to bronchiolitis, polio (poliomyelitis), croup, respiratory syncytial viral infection, mumps, erythema infectiosum (fifth disease), roseola infantum, progressive rubella panencephali tis, german measles, and subacute sclerosing panencephalitis), fungal pneumonia (e.g., Histoplasmosis, Coccidioidomycosis, Blastomycosis, fungal infections in people with severely suppressed immune systems (e.g., cryptococcosis, caused by Cryptococcus neoformans; aspergillosis, caused by Aspergillus spp.; candidiasis, caused by Candida; and mucormycosis)), Pneumocystis carinii (pneumocystis pneumonia), atypical pneumonias (e.g., Mycoplasma and Chlamydia spp.), opportunistic infection pneumonia, nosocomial pneumonia, chemical pneumonitis, and aspiration pneumonia, pleural disorders (e.g., pleurisy, pleural effusion, and pneumothorax (e.g., simple spontaneous pneumothorax, complicated spontaneous pneumothorax, tension pneumothorax)), obstructive airway diseases (e.g., asthma, chronic obstructive pulmonary disease (COPD), emphysema, chronic or acute bronchitis), occupational lung diseases (e.g., silicosis, black lung (coal workers' pneumoconiosis), asbestosis, berylliosis, occupational asthsma, byssinosis, and benign pneumoconioses), Infiltrative Lung Disease (e.g., pulmonary fibrosis (e.g., fibrosing alveolitis, usual interstitial pneumonia), idiopathic pulmonary fibrosis, desquamative interstitial pneumonia, lymphoid interstitial pneumonia, histiocytosis X (e.g., Letterer-Siwe disease, Hand-Schüller-Christian disease, eosinophilic granuloma), idiopathic pulmonary hemosiderosis, sarcoidosis and pulmonary alveolar proteinosis), Acute respiratory distress syndrome (also called, e.g., adult respiratory distress syndrome), edema, pulmonary embolism, bronchitis (e.g., viral, bacterial), bronchiectasis, atelectasis, lung abscess (caused by, e.g., Staphylococcus aureus or Legionella pneumophila), and cystic fibrosis.

### Anti-Angiogenesis Activity

[0636] The naturally occurring balance between endogenous stimulators and inhibitors of angiogenesis is one in which inhibitory influences predominate. Rastinejad et al., Cell 56:345-355 (1989). In those rare instances in which neovascularization occurs under normal physiological conditions, such as wound healing, organ regeneration, embryonic development, and female reproductive processes, angiogenesis is stringently regulated and spatially and temporally delimited. Under conditions of pathological angiogenesis such as that characterizing solid tumor growth, these regulatory controls fail. Unregulated angiogenesis becomes pathologic and sustains progression of many neoplastic and non-neoplastic diseases. A number of serious diseases are dominated by abnormal neovascularization including solid tumor growth and metastases, arthritis, some types of eye disorders, and psoriasis. See, e.g., reviews by Moses et al., Biotech. 9:630-634 (1991); Folkman et al., N. Engl. J. Med., 333:1757-1763 (1995); Auerbach et al., J. Microvasc. Res. 29:401-411 (1985); Folkman, Advances in Cancer Research, eds. Klein and Weinhouse, Academic Press, New York, pp. 175-203 (1985); Patz, Am. J. Opthalmol. 94:715-743 (1982); and Folkman et al., Science 221:719-725 (1983). In a number of pathological conditions, the process of angiogenesis contributes to the disease state. For example, significant data have accumulated which suggest that the growth of solid tumors is dependent on angiogenesis. Folkman and Klagsbrun, Science 235:442-447 (1987).

[0637] The present invention provides for treatment of diseases or disorders associated with neovascularization by administration of the polynucleotides and/or polypeptides of the invention, as well as agonists or antagonists of the present invention. Malignant and metastatic conditions which can be treated with the polynucleotides and polypeptides, or agonists or antagonists of the invention include, but are not limited to, malignancies, solid tumors, and cancers described herein and otherwise known in the art (for a review of such disorders, see Fishman et al., Medicine, 2d Ed., J. B. Lippincott Co., Philadelphia (1985)). Thus, the present invention provides a method of treating an angiogenesis-related disease and/or disorder, comprising administration to an individual in need thereof a therapeutically effective amount of a polynucleotide, polypeptide, antagonist and/or agonist of the invention. For example, polynucleotides, polypeptides, antagonists and/or agonists may be utilized in a variety of additional methods in order to therapeutically treat a cancer or tumor. Cancers which may be treated with polynucleotides, polypeptides, antagonists and/or agonists include, but are not limited to solid tumors, including prostate, lung, breast, ovarian, stomach, pancreas, larynx, esophagus, testes, liver, parotid, biliary tract, colon, rectum, cervix, uterus, endometrium, kidney, bladder, thyroid cancer; primary tumors and metastases; melanomas; glioblastoma; Kaposi's sarcoma; leiomyosarcoma; non-small cell lung cancer; colorectal cancer; advanced malignancies; and blood born tumors such as leukemias. For example, polynucleotides, polypeptides, antagonists and/or agonists may be delivered topically, in order to treat cancers such as skin cancer, head and neck tumors, breast tumors, and Kaposi's sarcoma.

[0638] Within yet other aspects, polynucleotides, polypeptides, antagonists and/or agonists may be utilized to treat superficial forms of bladder cancer by, for example, intravesical administration. Polynucleotides, polypeptides, antagonists and/or agonists may be delivered directly into the tumor, or near the tumor site, via injection or a catheter. Of course, as the artisan of ordinary skill will appreciate, the appropriate mode of administration will vary according to the cancer to be treated. Other modes of delivery are discussed herein.

[0639] Polynucleotides, polypeptides, antagonists and/or agonists may be useful in treating other disorders, besides cancers, which involve angiogenesis. These disorders include, but are not limited to: benign tumors, for example hemangiomas, acoustic neuromas, neurofibromas, trachomas, and pyogenic granulomas; artheroscleric plaques; ocular angiogenic diseases, for example, diabetic retinopathy, retinopathy of prematurity, macular degeneration, corneal graft rejection, neovascular glaucoma, retrolental fibroplasia, rubeosis, retinoblastoma, uvietis and Pterygia (abnormal blood vessel growth) of the eye; rheumatoid arthritis; psoriasis; delayed wound healing; endometriosis; vasculogenesis; granulations; hypertrophic scars (keloids); nonunion fractures; scleroderma; trachoma; vascular adhesions; myocardial angiogenesis; coronary collaterals; cerebral collaterals; arteriovenous malformations; ischemic limb angiogenesis; Osler-Webber Syndrome; plaque neovascularization; telangiectasia; hemophiliac joints; angiofibroma; fibromuscular dysplasia; wound granulation; Crohn's disease; and atherosclerosis.

[0640] For example, within one aspect of the present invention methods are provided for treating hypertrophic scars and keloids, comprising the step of administering a polynucleotide, polypeptide, antagonist and/or agonist of the invention to a hypertrophic scar or keloid.

[0641] Within one embodiment of the present invention polynucleotides, polypeptides, antagonists and/or agonists of the invention are directly injected into a hypertrophic scar or keloid, in order to prevent the progression of these lesions. This therapy is of particular value in the prophylactic treatment of conditions which are known to result in the development of hypertrophic scars and keloids (e.g., bums), and is preferably initiated after the proliferative phase has had time to progress (approximately 14 days after the initial injury), but before hypertrophic scar or keloid development. As noted above, the present invention also provides methods for treating neovascular diseases of the eye, including for example, corneal neovascularization, neovascular glaucoma, proliferative diabetic retinopathy, retrolental fibroplasia and macular degeneration.

[0642] Moreover, ocular disorders associated with neovascularization which can be treated with the polynucleotides and polypeptides of the present invention (including agonists and/or antagonists) include, but are not limited to: neovascular glaucoma, diabetic retinopathy, retinoblastoma, retrolental fibroplasia, uveitis, retinopathy of prematurity macular degeneration, corneal graft neovascularization, as well as other eye inflammatory diseases, ocular tumors and diseases associated with choroidal or iris neovascularization. See, e.g., reviews by Waltman et al., Am. J. Ophthal. 85:704-710 (1978) and Gartner et al., Surv. Ophthal. 22:291-312 (1978).

[0643] Thus, within one aspect of the present invention methods are provided for treating neovascular diseases of the eye such as corneal neovascularization (including corneal graft neovascularization), comprising the step of administering to a patient a therapeutically effective amount of a compound (as described above) to the cornea, such that the formation of blood vessels is inhibited. Briefly, the cornea is a tissue, which normally lacks blood vessels. In certain pathological conditions however, capillaries may extend into the cornea from the pericorneal vascular plexus of the limbus. When the cornea becomes vascularized, it also becomes clouded, resulting in a decline in the patient's visual acuity. Visual loss may become complete if the cornea completely opacitates. A wide variety of disorders can result in corneal neovascularization, including for example, corneal infections (e.g., trachoma, herpes simplex keratitis, leishmaniasis and onchocerciasis), immunological processes (e.g., graft rejection and Stevens-Johnson's syndrome), alkali burns, trauma, inflammation (of any cause), toxic and nutritional deficiency states, and as a complication of wearing contact lenses.

[0644] Within particularly preferred embodiments of the invention, may be prepared for topical administration in saline (combined with any of the preservatives and antimicrobial agents commonly used in ocular preparations), and administered in eyedrop form. The solution or suspension may be prepared in its pure form and administered several times daily. Alternatively, anti-angiogenic compositions, prepared as described above, may also be administered directly to the cornea. Within preferred embodiments, the anti-angiogenic composition is prepared with a muco-adhesive polymer, which binds to cornea. Within further embodiments, the anti-angiogenic factors or anti-angiogenic compositions may be utilized as an adjunct to conventional steroid therapy. Topical therapy may also be useful prophylactically in corneal lesions which are known to have a high probability of inducing an angiogenic response (such as chemical burns). In these instances the treatment, likely in combination with steroids, may be instituted immediately to help prevent subsequent complications.

[0645] Within other embodiments, the compounds described above may be injected directly into the corneal stroma by an ophthalmologist under microscopic guidance. The preferred site of injection may vary with the morphology of the individual lesion, but the goal of the administration would be to place the composition at the advancing front of the vasculature (i.e., interspersed between the blood vessels and the normal cornea). In most cases this would involve perilimbic corneal injection to “protect” the cornea from the advancing blood vessels. This method may also be utilized shortly after a corneal insult in order to prophylactically prevent corneal neovascularization. In this situation, the material could be injected in the perilimbic cornea interspersed between the corneal lesion and its undesired potential limbic blood supply. Such methods may also be utilized in a similar fashion to prevent capillary invasion of transplanted corneas. In a sustained-release form, injections might only be required 2-3 times per year. A steroid could also be added to the injection solution to reduce inflammation resulting from the injection itself.

[0646] Within another aspect of the present invention, methods are provided for treating neovascular glaucoma, comprising the step of administering to a patient a therapeutically effective amount of a polynucleotide, polypeptide, antagonist and/or agonist to the eye, such that the formation of blood vessels is inhibited. In one embodiment, the compound may be administered topically to the eye in order to treat early forms of neovascular glaucoma. Within other embodiments, the compound may be implanted by injection into the region of the anterior chamber angle. Within other embodiments, the compound may also be placed in any location such that the compound is continuously released into the aqueous humor. Within another aspect of the present invention, methods are provided for treating proliferative diabetic retinopathy, comprising the step of administering to a patient a therapeutically effective amount of a polynucleotide, polypeptide, antagonist and/or agonist to the eyes, such that the formation of blood vessels is inhibited.

[0647] Within particularly preferred embodiments of the invention, proliferative diabetic retinopathy may be treated by injection into the aqueous humor or the vitreous, in order to increase the local concentration of the polynucleotide, polypeptide, antagonist and/or agonist in the retina. Preferably, this treatment should be initiated prior to the acquisition of severe disease requiring photocoagulation.

[0648] Within another aspect of the present invention, methods are provided for treating retrolental fibroplasia, comprising the step of administering to a patient a therapeutically effective amount of a polynucleotide, polypeptide, antagonist and/or agonist to the eye, such that the formation of blood vessels is inhibited. The compound may be administered topically, via intravitreous injection and/or via intraocular implants.

[0649] Additionally, disorders which can be treated with the polynucleotides, polypeptides, agonists and/or agonists include, but are not limited to, hemangioma, arthritis, psoriasis, angiofibroma, atherosclerotic plaques, delayed wound healing, granulations, hemophilic joints, hypertrophic scars, nonunion fractures, Osler-Weber syndrome, pyogenic granuloma, scleroderma, trachoma, and vascular adhesions.

[0650] Moreover, disorders and/or states, which can be treated, prevented, diagnosed and/or prognosed with the polynucleotides, polypeptides, agonists and/or agonists of the invention include, but are not limited to, solid tumors, blood born tumors such as leukemias, tumor metastasis, Kaposi's sarcoma, benign tumors, for example hemangiomas, acoustic neuromas, neurofibromas, trachomas, and pyogenic granulomas, rheumatoid arthritis, psoriasis, ocular angiogenic diseases, for example, diabetic retinopathy, retinopathy of prematurity, macular degeneration, corneal graft rejection, neovascular glaucoma, retrolental fibroplasia, rubeosis, retinoblastoma, and uvietis, delayed wound healing, endometriosis, vascluogenesis, granulations, hypertrophic scars (keloids), nonunion fractures, scleroderma, trachoma, vascular adhesions, myocardial angiogenesis, coronary collaterals, cerebral collaterals, arteriovenous malformations, ischemic limb angiogenesis, Osler-Webber Syndrome, plaque neovascularization, telangiectasia, hemophiliac joints, angiofibroma fibromuscular dysplasia, wound granulation, Crohn's disease, atherosclerosis, birth control agent by preventing vascularization required for embryo implantation controlling menstruation, diseases that have angiogenesis as a pathologic consequence such as cat scratch disease (Rochele minalia quintosa), ulcers (Helicobacter pylor), Bartonellosis and bacillary -angiomatosis.

[0651] In one aspect of the birth control method, an amount of the compound sufficient to block embryo implantation is administered before or after intercourse and fertilization have occurred, thus providing an effective method of birth control, possibly a “morning after” method. Polynucleotides, polypeptides, agonists and/or agonists may also be used in controlling menstruation or administered as either a peritoneal lavage fluid or for peritoneal implantation in the treatment of endometriosis.

[0652] Polynucleotides, polypeptides, agonists and/or agonists of the present invention may be incorporated into surgical sutures in order to prevent stitch granulomas.

[0653] Polynucleotides, polypeptides, agonists and/or agonists may be utilized in a wide variety of surgical procedures. For example, within one aspect of the present invention a compositions (in the form of, for example, a spray or film) may be utilized to coat or spray an area prior to removal of a tumor, in order to isolate normal surrounding tissues from malignant tissue, and/or to prevent the spread of disease to surrounding tissues. Within other aspects of the present invention, compositions (e.g., in the form of a spray) may be delivered via endoscopic procedures in order to coat tumors, or inhibit angiogenesis in a desired locale. Within yet other aspects of the present invention, surgical meshes, which have been coated with anti-angiogenic compositions of the present invention may be utilized in any procedure wherein a surgical mesh might be utilized. For example, within one embodiment of the invention a surgical mesh laden with an anti-angiogenic composition may be utilized during abdominal cancer resection surgery (e.g., subsequent to colon resection) in order to provide support to the structure, and to release an amount of the anti-angiogenic factor.

[0654] Within further aspects of the present invention, methods are provided for treating tumor excision sites, comprising administering a polynucleotide, polypeptide, agonist and/or agonist to the resection margins of a tumor subsequent to excision, such that the local recurrence of cancer and the formation of new blood vessels at the site is inhibited. Within one embodiment of the invention, the anti-angiogenic compound is administered directly to the tumor excision site (e.g., applied by swabbing, brushing or otherwise coating the resection margins of the tumor with the anti-angiogenic compound). Alternatively, the anti-angiogenic compounds may be incorporated into known surgical pastes prior to administration. Within particularly preferred embodiments of the invention, the anti-angiogenic compounds are applied after hepatic resections for malignancy, and after neurosurgical operations.

[0655] Within one aspect of the present invention, polynucleotides, polypeptides, agonists and/or agonists may be administered to the resection margin of a wide variety of tumors, including for example, breast, colon, brain and hepatic tumors. For example, within one embodiment of the invention, anti-angiogenic compounds may be administered to the site of a neurological tumor subsequent to excision, such that the formation of new blood vessels at the site are inhibited.

[0656] The polynucleotides, polypeptides, agonists and/or agonists of the present invention may also be administered along with other anti-angiogenic factors. Representative examples of other anti-angiogenic factors include: Anti-Invasive Factor, retinoic acid and derivatives thereof, paclitaxel, Suramin, Tissue Inhibitor of Metalloproteinase-1, Tissue Inhibitor of Metalloproteinase-2, Plasminogen Activator Inhibitor-1, Plasminogen Activator Inhibitor-2, and various forms of the lighter “d group” transition metals.

[0657] Lighter “d group” transition metals include, for example, vanadium, molybdenum, tungsten, titanium, niobium, and tantalum species. Such transition metal species may form transition metal complexes. Suitable complexes of the above-mentioned transition metal species include oxo transition metal complexes.

[0658] Representative examples of vanadium complexes include oxo vanadium complexes such as vanadate and vanadyl complexes. Suitable vanadate complexes include metavanadate and orthovanadate complexes such as, for example, ammonium metavanadate, sodium metavanadate, and sodium orthovanadate. Suitable vanadyl complexes include, for example, vanadyl acetylacetonate and vanadyl sulfate including vanadyl sulfate hydrates such as vanadyl sulfate mono- and trihydrates.

[0659] Representative examples of tungsten and molybdenum complexes also include oxo complexes. Suitable oxo tungsten complexes include tungstate and tungsten oxide complexes. Suitable tungstate complexes include ammonium tungstate, calcium tungstate, sodium tungstate dihydrate, and tungstic acid. Suitable tungsten oxides include tungsten (IV) oxide and tungsten (VI) oxide. Suitable oxo molybdenum complexes include molybdate, molybdenum oxide, and molybdenyl complexes. Suitable molybdate complexes include ammonium molybdate and its hydrates, sodium molybdate and its hydrates, and potassium molybdate and its hydrates. Suitable molybdenum oxides include molybdenum (VI) oxide, molybdenum (VI) oxide, and molybdic acid. Suitable molybdenyl complexes include, for example, molybdenyl acetylacetonate. Other suitable tungsten and molybdenum complexes include hydroxo derivatives derived from, for example, glycerol, tartaric acid, and sugars.

[0660] A wide variety of other anti-angiogenic factors may also be utilized within the context of the present invention. Representative examples include platelet factor 4; protamine sulphate; sulphated chitin derivatives (prepared from queen crab shells), (Murata et al., Cancer Res. 51: 22-26 (1991)); Sulphated Polysaccharide Peptidoglycan Complex (SP-PG) (the function of this compound may be enhanced by the presence of steroids such as estrogen, and tamoxifen citrate); Staurosporine; modulators of matrix metabolism, including for example, proline analogs, cishydroxyproline, d,L-3,4-dehydroproline, Thiaproline, alpha,alpha-dipyridyl, aminopropionitrile fumarate; 4-propyl-5-(4-pyridinyl)-2(3H)-oxazolone; Methotrexate; Mitoxantrone; Heparin; Interferons; 2 Macroglobulin-serum; ChIMP-3 (Pavloff et al., J. Bio. Chem. 267:17321-17326 (1992)); Chymostatin (Tomkinson et al., Biochem J. 286:475-480 (1992)); Cyclodextrin Tetradecasulfate; Eponemycin; Camptothecin; Fumagillin (Ingber et al., Nature 348:555-557 (1990)); Gold Sodium Thiomalate (“GST”; Matsubara and Ziff, J. Clin. Invest. 79:1440-1446 (1987)); anticollagenase-serum; alpha2-antiplasmin (Holmes et al., J. Biol. Chem. 262(4):1659-1664 (1987)); Bisantrene (National Cancer Institute); Lobenzarit disodium (N-(2)-carboxyphenyl-4-chloroanthronilic acid disodium or “CCA”; Takeuchi et al., Agents Actions 36:312-316, 1992); Thalidomide; Angostatic steroid; AGM-1470; carboxynaminolmidazole; and metalloproteinase inhibitors such as BB94.

### Musculoskeletal System Disorders

[0661] Polynucleotides, polypeptides, antibodies, and/or agonists or antagonists of the present invention, may be used to treat, prevent, diagnose, and/or prognose disorders of the musculoskeletal system, including but not limited to, disorders of the bone, joints, ligaments, tendons, bursa, muscle, and/or neoplasms and cancers associated with musculoskeletal tissue.

[0662] Diseases or disorders of the bone include, but are not limited to, Albers-Schönberg disease, bowlegs, heel spurs, Köhler's bone disease, knock-knees, Legg-Calvé-Perthes disease, Marfan's syndrome, mucopolysaccharidoses, Osgood-Schlatter disease, osteochondroses, osteochondrodysplasia, osteomyelitis, osteopetroses, osteoporosis (postmenopausal, senile, and juvenile), Paget's disease, Scheuermann's disease, scoliosis, Sever's disease, and patellofemoral stress syndrome.

[0663] Joint diseases or disorders include, but are not limited to, ankylosing spondylitis, Behcet's syndrome, CREST syndrome, Ehlers-Danlos syndrome, infectious arthritis, discoid lupus erythematosus, systemic lupus erythematosus, Lyme disease, osteoarthritis, psoriatic arthritis, relapsing polychondrites, Reiter's syndrome, rheumatoid arthritis (adult and juvenile), scleroderma, and Still's disease.

[0664] Diseases or disorders affecting ligaments, tendons, or bursa include, but are not limited to, ankle sprain, bursitis, posterior Achilles tendon bursitis (Haglund's deformity), anterior Achilles tendon bursitis (Albert's disease), tendinitis, tenosynovitis, poplieus tendinitis, Achilles tendinitis, medial or lateral epicondylitis, rotator cuff tendinitis, spasmodic torticollis, and fibromyalgia syndrome.

[0665] Muscle diseases or disorders include, but are not limited to, Becker's muscular dystrophy, Duchenne's muscular dystrophy, Landouzy-Dejerine muscular dystrophy, Leyden-Möbius muscular dystrophy, Erb's muscular dystrophy, Charcot's joints, dermatomyositis, gout, pseudogout, glycogen storage diseases, Pompe's disease, mitochondrial myopathy, periodic paralysis, polymyalgia rheumatica, polymyositis, Steinert's disease, Thomsen's disease, anterolateral and posteromedial shin splints, posterior femoral muscle strain, and fibromyositis.

[0666] Musculoskeletal tissue may also develop cancers and/or neoplasms that include, but are not limited to, osteochondroma, benign chondroma, chondroblastoma, chondromyxoid fibroma, osteoid osteoma, giant cell tumor, multiple myeloma, osteosarcoma, fibrosarcoma, malignant fibrous histiocytoma, chondrosarcoma, Ewing's tumor, and malignant lymphoma of bone.

### Neural Activity and Neurological Diseases

[0667] The polynucleotides, polypeptides and agonists or antagonists of the invention may be used for the diagnosis and/or treatment of diseases, disorders, damage or injury of the brain and/or nervous system. Nervous system disorders that can be treated with the compositions of the invention (e.g., polypeptides, polynucleotides, and/or agonists or antagonists), include, but are not limited to, nervous system injuries, and diseases or disorders which result in either a disconnection of axons, a diminution or degeneration of neurons, or demyelination. Nervous system lesions which may be treated in a patient (including human and non-human mammalian patients) according to the methods of the invention, include but are not limited to, the following lesions of either the central (including spinal cord, brain) or peripheral nervous systems: (1) ischemic lesions, in which a lack of oxygen in a portion of the nervous system results in neuronal injury or death, including cerebral infarction or ischemia, or spinal cord infarction or ischemia; (2) traumatic lesions, including lesions caused by physical injury or associated with surgery, for example, lesions which sever a portion of the nervous system, or compression injuries; (3) malignant lesions, in which a portion of the nervous system is destroyed or injured by malignant tissue which is either a nervous system associated malignancy or a malignancy derived from non-nervous system tissue; (4) infectious lesions, in which a portion of the nervous system is destroyed or injured as a result of infection, for example, by an abscess or associated with infection by human immunodeficiency virus, herpes zoster, or herpes simplex virus or with Lyme disease, tuberculosis, or syphilis; (5) degenerative lesions, in which a portion of the nervous system is destroyed or injured as a result of a degenerative process including but not limited to, degeneration associated with Parkinson's disease, Alzheimer's disease, Huntington's chorea, or amyotrophic lateral sclerosis (ALS); (6) lesions associated with nutritional diseases or disorders, in which a portion of the nervous system is destroyed or injured by a nutritional disorder or disorder of metabolism including, but not limited to, vitamin B12 deficiency, folic acid deficiency, Wernicke disease, tobacco-alcohol amblyopia, Marchiafava-Bignami disease (primary degeneration of the corpus callosum), and alcoholic cerebellar degeneration; (7) neurological lesions associated with systemic diseases including, but not limited to, diabetes (diabetic neuropathy, Bell's palsy), systemic lupus erythematosus, carcinoma, or sarcoidosis; (8) lesions caused by toxic substances including alcohol, lead, or particular neurotoxins; and (9) demyelinated lesions in which a portion of the nervous system is destroyed or injured by a demyelinating disease including, but not limited to, multiple sclerosis, human immunodeficiency virus-associated myelopathy, transverse myelopathy or various etiologies, progressive multifocal leukoencephalopathy, and central pontine myelinolysis.

[0668] In one embodiment, the polypeptides, polynucleotides, or agonists or antagonists of the invention are used to protect neural cells from the damaging effects of hypoxia. In a further preferred embodiment, the polypeptides, polynucleotides, or agonists or antagonists of the invention are used to protect neural cells from the damaging effects of cerebral hypoxia. According to this embodiment, the compositions of the invention are used to treat or prevent neural cell injury associated with cerebral hypoxia. In one non-exclusive aspect of this embodiment, the polypeptides, polynucleotides, or agonists or antagonists of the invention, are used to treat or prevent neural cell injury associated with cerebral ischemia. In another non-exclusive aspect of this embodiment, the polypeptides, polynucleotides, or agonists or antagonists of the invention are used to treat or prevent neural cell injury associated with cerebral infarction.

[0669] In another preferred embodiment, the polypeptides, polynucleotides, or agonists or antagonists of the invention are used to treat or prevent neural cell injury associated with a stroke. In a specific embodiment, the polypeptides, polynucleotides, or agonists or antagonists of the invention are used to treat or prevent cerebral neural cell injury associated with a stroke.

[0670] In another preferred embodiment, the polypeptides, polynucleotides, or agonists or antagonists of the invention are used to treat or prevent neural cell injury associated with a heart attack. In a specific embodiment, the polypeptides, polynucleotides, or agonists or antagonists of the invention are used to treat or prevent cerebral neural cell injury associated with a heart attack.

[0671] The compositions of the invention which are useful for treating or preventing a nervous system disorder may be selected by testing for biological activity in promoting the survival or differentiation of neurons. For example, and not by way of limitation, compositions of the invention which elicit any of the following effects may be useful according to the invention: (1) increased survival time of neurons in culture either in the presence or absence of hypoxia or hypoxic conditions; (2) increased sprouting of neurons in culture or in vivo; (3) increased production of a neuron-associated molecule in culture or in vivo, e.g., choline acetyltransferase or acetylcholinesterase with respect to motor neurons; or (4) decreased symptoms of neuron dysfunction in vivo. Such effects may be measured by any method known in the art. In preferred, non-limiting embodiments, increased survival of neurons may routinely be measured using a method set forth herein or otherwise known in the art, such as, for example, in Zhang et al., Proc Natl Acad Sci USA 97:363742 (2000) or in Arakawa et al., J. Neurosci., 10:3507-15 (1990); increased sprouting of neurons may be detected by methods known in the art, such as, for example, the methods set forth in Pestronk et al., Exp. Neurol., 70:65-82 (1980), or Brown et al., Ann. Rev. Neurosci., 4:17-42 (1981); increased production of neuron-associated molecules may be measured by bioassay, enzymatic assay, antibody binding, Northern blot assay, etc., using techniques known in the art and depending on the molecule to be measured; and motor neuron dysfunction may be measured by assessing the physical manifestation of motor neuron disorder, e.g., weakness, motor neuron conduction velocity, or functional disability.

[0672] In specific embodiments, motor neuron disorders that may be treated according to the invention include, but are not limited to, disorders such as infarction, infection, exposure to toxin, trauma, surgical damage, degenerative disease or malignancy that may affect motor neurons as well as other components of the nervous system, as well as disorders that selectively affect neurons such as amyotrophic lateral sclerosis, and including, but not limited to, progressive spinal muscular atrophy, progressive bulbar palsy, primary lateral sclerosis, infantile and juvenile muscular atrophy, progressive bulbar paralysis of childhood (Fazio-Londe syndrome), poliomyelitis and the post polio syndrome, and Hereditary Motorsensory Neuropathy (Charcot-Marie-Tooth Disease).

[0673] Further, polypeptides or polynucleotides of the invention may play a role in neuronal survival; synapse formation; conductance; neural differentiation, etc. Thus, compositions of the invention (including polynucleotides, polypeptides, and agonists or antagonists) may be used to diagnose and/or treat or prevent diseases or disorders associated with these roles, including, but not limited to, learning and/or cognition disorders. The compositions of the invention may also be useful in the treatment or prevention of neurodegenerative disease states and/or behavioural disorders. Such neurodegenerative disease states and/or behavioral disorders include, but are not limited to, Alzheimer's Disease, Parkinson's Disease, Huntington's Disease, Tourette Syndrome, schizophrenia, mania, dementia, paranoia, obsessive compulsive disorder, panic disorder, learning disabilities, ALS, psychoses, autism, and altered behaviors, including disorders in feeding, sleep patterns, balance, and perception. In addition, compositions of the invention may also play a role in the treatment, prevention and/or detection of developmental disorders associated with the developing embryo, or sexually-linked disorders.

[0674] Additionally, polypeptides, polynucleotides and/or agonists or antagonists of the invention, may be useful in protecting neural cells from diseases, damage, disorders, or injury, associated with cerebrovascular disorders including, but not limited to, carotid artery diseases (e.g., carotid artery thrombosis, carotid stenosis, or Moyamoya Disease), cerebral amyloid angiopathy, cerebral aneurysm, cerebral anoxia, cerebral arteriosclerosis, cerebral arteriovenous malformations, cerebral artery diseases, cerebral embolism and thrombosis (e.g., carotid artery thrombosis, sinus thrombosis, or Wallenberg's Syndrome), cerebral hemorrhage (e.g., epidural or subdural hematoma, or subarachnoid hemorrhage), cerebral infarction, cerebral ischemia (e.g., transient cerebral ischemia, Subclavian Steal Syndrome, or vertebrobasilar insufficiency), vascular dementia (e.g., multi-infarct), leukomalacia, periventricular, and vascular headache (e.g., cluster headache or migraines).

[0675] In accordance with yet a further aspect of the present invention, there is provided a process for utilizing polynucleotides or polypeptides, as well as agonists or antagonists of the present invention, for therapeutic purposes, for example, to stimulate neurological cell proliferation and/or differentiation. Therefore, polynucleotides, polypeptides, agonists and/or antagonists of the invention may be used to treat and/or detect neurologic diseases. Moreover, polynucleotides or polypeptides, or agonists or antagonists of the invention, can be used as a marker or detector of a particular nervous system disease or disorder.

[0676] Examples of neurologic diseases which can be treated or detected with polynucleotides, polypeptides, agonists, and/or antagonists of the present invention include brain diseases, such as metabolic brain diseases which includes phenylketonuria such as maternal phenylketonuria, pyruvate carboxylase deficiency, pyruvate dehydrogenase complex deficiency, Wernicke's Encephalopathy, brain edema, brain neoplasms such as cerebellar neoplasms which include infratentorial neoplasms, cerebral ventricle neoplasms such as choroid plexus neoplasms, hypothalamic neoplasms, supratentorial neoplasms, canavan disease, cerebellar diseases such as cerebellar ataxia which include spinocerebellar degeneration such as ataxia telangiectasia, cerebellar dyssynergia, Friederich's Ataxia, Machado-Joseph Disease, olivopontocerebellar atrophy, cerebellar neoplasms such as infratentorial neoplasms, diffuse cerebral sclerosis such as encephalitis periaxialis, globoid cell leukodystrophy, metachromatic leukodystrophy and subacute sclerosing panencephalitis.

[0677] Additional neurologic diseases which can be treated or detected with polynucleotides, polypeptides, agonists, and/or antagonists of the present invention include cerebrovascular disorders (such as carotid artery diseases which include carotid artery thrombosis, carotid stenosis and Moyamoya Disease), cerebral amyloid angiopathy, cerebral aneurysm, cerebral anoxia, cerebral arteriosclerosis, cerebral arteriovenous malformations, cerebral artery diseases, cerebral embolism and thrombosis such as carotid artery thrombosis, sinus thrombosis and Wallenberg's Syndrome, cerebral hemorrhage such as epidural hematoma, subdural hematoma and subarachnoid hemorrhage, cerebral infarction, cerebral ischemia such as transient cerebral ischemia, Subclavian Steal Syndrome and vertebrobasilar insufficiency, vascular dementia such as multi-infarct dementia, periventricular leukomalacia, vascular headache such as cluster headache and migraine.

[0678] Additional neurologic diseases which can be treated or detected with polynucleotides, polypeptides, agonists, and/or antagonists of the present invention include dementia such as AIDS Dementia Complex, presenile dementia such as Alzheimer's Disease and Creutzfeldt-Jakob Syndrome, senile dementia such as Alzheimer's Disease and progressive supranuclear palsy, vascular dementia such as multi-infarct dementia, encephalitis which include encephalitis periaxialis, viral encephalitis such as epidemic encephalitis, Japanese Encephalitis, St. Louis Encephalitis, tick-borne encephalitis and West Nile Fever, acute disseminated encephalomyelitis, meningoencephalitis such as uveomeningoencephalitic syndrome, Postencephalitic Parkinson Disease and subacute sclerosing panencephalitis, encephalomalacia such as periventricular leukomalacia, epilepsy such as generalized epilepsy which includes infantile spasms, absence epilepsy, myoclonic epilepsy which includes MERRF Syndrome, tonic-clonic epilepsy, partial epilepsy such as complex partial epilepsy, frontal lobe epilepsy and temporal lobe epilepsy, post-traumatic epilepsy, status epilepticus such as Epilepsia Partialis Continua, and Hallervorden-Spatz Syndrome.

[0679] Additional neurologic diseases which can be treated or detected with polynucleotides, polypeptides, agonists, and/or antagonists of the present invention include hydrocephalus such as Dandy-Walker Syndrome and normal pressure hydrocephalus, hypothalamic diseases such as hypothalamic neoplasms, cerebral malaria, narcolepsy which includes cataplexy, bulbar poliomyelitis, cerebri pseudotumor, Rett Syndrome, Reye's Syndrome, thalamic diseases, cerebral toxoplasmosis, intracranial tuberculoma and Zellweger Syndrome, central nervous system infections such as AIDS Dementia Complex, Brain Abscess, subdural empyema, encephalomyelitis such as Equine Encephalomyelitis, Venezuelan Equine Encephalomyelitis, Necrotizing Hemorrhagic Encephalomyelitis, Visna, and cerebral malaria.

[0680] Additional neurologic diseases which can be treated or detected with polynucleotides, polypeptides, agonists, and/or antagonists of the present invention include meningitis such as arachnoiditis, aseptic meningtitis such as viral meningtitis which includes lymphocytic choriomeningitis, Bacterial meningtitis which includes Haemophilus Meningtitis, Listeria Meningtitis, Meningococcal Meningtitis such as Waterhouse-Friderichsen Syndrome, Pneumococcal Meningtitis and meningeal tuberculosis, fungal meningitis such as Cryptococcal Meningtitis, subdural effusion, meningoencephalitis such as uvemeningoencephalitic syndrome, myelitis such as transverse myelitis, neurosyphilis such as tabes dorsalis, poliomyelitis which includes bulbar poliomyelitis and postpoliomyelitis syndrome, prion diseases (such as Creutzfeldt-Jakob Syndrome, Bovine Spongiform Encephalopathy, Gerstmann-Straussler Syndrome, Kuru, Scrapie), and cerebral toxoplasmosis.

[0681] Additional neurologic diseases which can be treated or detected with polynucleotides, polypeptides, agonists, and/or antagonists of the present invention include central nervous system neoplasms such as brain neoplasms that include cerebellar neoplasms such as infratentorial neoplasms, cerebral ventricle neoplasms such as choroid plexus neoplasms, hypothalamic neoplasms and supratentorial neoplasms, meningeal neoplasms, spinal cord neoplasms which include epidural neoplasms, demyelinating diseases such as Canavan Diseases, diffuse cerebral sceloris which includes adrenoleukodystrophy, encephalitis periaxialis, globoid cell leukodystrophy, diffuse cerebral sclerosis such as metachromatic leukodystrophy, allergic encephalomyelitis, necrotizing hemorrhagic encephalomyelitis, progressive multifocal leukoencephalopathy, multiple sclerosis, central pontine myelinolysis, transverse myelitis, neuromyelitis optica, Scrapie, Swayback, Chronic Fatigue Syndrome, Visna, High Pressure Nervous Syndrome, Meningism, spinal cord diseases such as amyotonia congenita, amyotrophic lateral sclerosis, spinal muscular atrophy such as Werdnig-Hoffmann Disease, spinal cord compression, spinal cord neoplasms such as epidural neoplasms, syringomyelia, Tabes Dorsalis, Stiff-Man Syndrome, mental retardation such as Angelman Syndrome, Cri-du-Chat Syndrome, De Lange's Syndrome, Down Syndrome, Gangliosidoses such as gangliosidoses G(M1), Sandhoff Disease, Tay-Sachs Disease, Hartnup Disease, homocystinuria, Laurence-Moon-Biedl Syndrome, Lesch-Nyhan Syndrome, Maple Syrup Urine Disease, mucolipidosis such as fucosidosis, neuronal ceroid-lipofuscinosis, oculocerebrorenal syndrome, phenylketonuria such as maternal phenylketonuria, Prader-Willi Syndrome, Rett Syndrome, Rubinstein-Taybi Syndrome, Tuberous Sclerosis, WAGR Syndrome, nervous system abnormalities such as holoprosencephaly, neural tube defects such as anencephaly which includes hydrangencephaly, Arnold-Chairi Deformity, encephalocele, meningocele, meningomyelocele, spinal dysraphism such as spina bifida cystica and spina bifida occulta.

[0682] Additional neurologic diseases which can be treated or detected with polynucleotides, polypeptides, agonists, and/or antagonists of the present invention include hereditary motor and sensory neuropathies which include Charcot-Marie Disease, Hereditary optic atrophy, Refsum's Disease, hereditary spastic paraplegia, Werdnig-Hoffmann Disease, Hereditary Sensory and Autonomic Neuropathies such as Congenital Analgesia and Familial Dysautonomia, Neurologic manifestations (such as agnosia that include Gerstmann's Syndrome, Amnesia such as retrograde amnesia, apraxia, neurogenic bladder, cataplexy, communicative disorders such as hearing disorders that includes deafness, partial hearing loss, loudness recruitment and tinnitus, language disorders such as aphasia which include agraphia, anomia, broca aphasia, and Wernicke Aphasia, Dyslexia such as Acquired Dyslexia, language development disorders, speech disorders such as aphasia which includes anomia, broca aphasia and Wernicke Aphasia, articulation disorders, communicative disorders such as speech disorders which include dysarthria, echolalia, mutism and stuttering, voice disorders such as aphonia and hoarseness, decerebrate state, delirium, fasciculation, hallucinations, meningism, movement disorders such as angelman syndrome, ataxia, athetosis, chorea, dystonia, hypokinesia, muscle hypotonia, myoclonus, tic, torticollis and tremor, muscle hypertonia such as muscle rigidity such as stiff-man syndrome, muscle spasticity, paralysis such as facial paralysis which includes Herpes Zoster Oticus, Gastroparesis, Hemiplegia, ophthalmoplegia such as diplopia, Duane's Syndrome, Homer's Syndrome, Chronic progressive external ophthalmoplegia such as Kearns Syndrome, Bulbar Paralysis, Tropical Spastic Paraparesis, Paraplegia such as Brown-Sequard Syndrome, quadriplegia, respiratory paralysis and vocal cord paralysis, paresis, phantom limb, taste disorders such as ageusia and dysgeusia, vision disorders such as amblyopia, blindness, color vision defects, diplopia, hemianopsia, scotoma and subnormal vision, sleep disorders such as hypersomnia which includes Kleine-Levin Syndrome, insomnia, and somnambulism, spasm such as trismus, unconsciousness such as coma, persistent vegetative state and syncope and vertigo, neuromuscular diseases such as amyotonia congenital amyotrophic lateral sclerosis, Lambert-Eaton Myasthenic Syndrome, motor neuron disease, muscular atrophy such as spinal muscular atrophy, Charcot-Marie Disease and Werdnig-Hoffmann Disease, Postpoliomyelitis Syndrome, Muscular Dystrophy, Myasthenia Gravis, Myotonia Atrophica, Myotonia Confenita, Nemaline Myopathy, Familial Periodic Paralysis, Multiplex Paramyloclonus, Tropical Spastic Paraparesis and Stiff-Man Syndrome, peripheral nervous system diseases such as acrodynia, amyloid neuropathies, autonomic nervous system diseases such as Adie's Syndrome, Barre-Lieou Syndrome, Familial Dysautonomia, Homer's Syndrome, Reflex Sympathetic Dystrophy and Shy-Drager Syndrome, Cranial Nerve Diseases such as Acoustic Nerve Diseases such as Acoustic Neuroma which includes Neurofibromatosis 2, Facial Nerve Diseases such as Facial Neuralgia, Melkersson-Rosenthal Syndrome, ocular motility disorders which includes amblyopia, nystagmus, oculomotor nerve paralysis, ophthalmoplegia such as Duane's Syndrome, Horner's Syndrome, Chronic Progressive External Ophthalmoplegia which includes Kearns Syndrome, Strabismus such as Esotropia and Exotropia, Oculomotor Nerve Paralysis, Optic Nerve Diseases such as Optic Atrophy which includes Hereditary Optic Atrophy, Optic Disk Drusen, Optic Neuritis such as Neuromyelitis Optica, Papilledema, Trigeminal Neuralgia, Vocal Cord Paralysis, Demyelinating Diseases such as Neuromyelitis Optica and Swayback, and Diabetic neuropathies such as diabetic foot.

[0683] Additional neurologic diseases which can be treated or detected with polynucleotides, polypeptides, agonists, and/or antagonists of the present invention include nerve compression syndromes such as carpal tunnel syndrome, tarsal tunnel syndrome, thoracic outlet syndrome such as cervical rib syndrome, ulnar nerve compression syndrome, neuralgia such as causalgia, cervico-brachial neuralgia, facial neuralgia and trigeminal neuralgia, neuritis such as experimental allergic neuritis, optic neuritis, polyneuritis, polyradiculoneuritis and radiculities such as polyradiculitis, hereditary motor and sensory neuropathies such as Charcot-Marie Disease, Hereditary Optic Atrophy, Refsum's Disease, Hereditary Spastic Paraplegia and Werdnig-Hoffmann Disease, Hereditary Sensory and Autonomic Neuropathies which include Congenital Analgesia and Familial Dysautonomia, POEMS Syndrome, Sciatica, Gustatory Sweating and Tetany).

### Endocrine Disorders

[0684] Polynucleotides or polypeptides, or agonists or antagonists of the present invention, may be used to treat, prevent, diagnose, and/or prognose disorders and/or diseases related to hormone imbalance, and/or disorders or diseases of the endocrine system.

[0685] Hormones secreted by the glands of the endocrine system control physical growth, sexual function, metabolism, and other functions. Disorders may be classified in two ways: disturbances in the production of hormones, and the inability of tissues to respond to hormones. The etiology of these hormone imbalance or endocrine system diseases, disorders or conditions may be genetic, somatic, such as cancer and some autoimmune diseases, acquired (e.g., by chemotherapy, injury or toxins), or infectious. Moreover, polynucleotides, polypeptides, antibodies, and/or agonists or antagonists of the present invention can be used as a marker or detector of a particular disease or disorder related to the endocrine system and/or hormone imbalance.

[0686] Endocrine system and/or hormone imbalance and/or diseases encompass disorders of uterine motility including, but not limited to: complications with pregnancy and labor (e.g., pre-term labor, post-term pregnancy, spontaneous abortion, and slow or stopped labor); and disorders and/or diseases of the menstrual cycle (e.g., dysmenorrhea and endometriosis).

[0687] Endocrine system and/or hormone imbalance disorders and/or diseases include disorders and/or diseases of the pancreas, such as, for example, diabetes mellitus, diabetes insipidus, congenital pancreatic agenesis, pheochromocytoma—islet cell tumor syndrome; disorders and/or diseases of the adrenal glands such as, for example, Addison's Disease, corticosteroid deficiency, virilizing disease, hirsutism, Cushing's Syndrome, hyperaldosteronism, pheochromocytoma; disorders and/or diseases of the pituitary gland, such as, for example, hyperpituitarism, hypopituitarism, pituitary dwarfism, pituitary adenoma, panhypopituitarism, acromegaly, gigantism; disorders and/or diseases of the thyroid, including but not limited to, hyperthyroidism, hypothyroidism, Plummer's disease, Graves' disease (toxic diffuse goiter), toxic nodular goiter, thyroiditis (Hashimoto's thyroiditis, subacute granulomatous thyroiditis, and silent lymphocytic thyroiditis), Pendred's syndrome, myxedema, cretinism, thyrotoxicosis, thyroid hormone coupling defect, thymic aplasia, Hurthle cell tumours of the thyroid, thyroid cancer, thyroid carcinoma, Medullary thyroid carcinoma; disorders and/or diseases of the parathyroid, such as, for example, hyperparathyroidism, hypoparathyroidism; disorders and/or diseases of the hypothalamus.

[0688] In addition, endocrine system and/or hormone imbalance disorders and/or diseases may also include disorders and/or diseases of the testes or ovaries, including cancer. Other disorders and/or diseases of the testes or ovaries further include, for example, ovarian cancer, polycystic ovary syndrome, Klinefelter's syndrome, vanishing testes syndrome (bilateral anorchia), congenital absence of Leydig's cells, cryptorchidism, Noonan's syndrome, myotonic dystrophy, capillary haemangioma of the testis (benign), neoplasias of the testis and neo-testis.

[0689] Moreover, endocrine system and/or hormone imbalance disorders and/or diseases may also include disorders and/or diseases such as, for example, polyglandular deficiency syndromes, pheochromocytoma, neuroblastoma, multiple Endocrine neoplasia, and disorders and/or cancers of endocrine tissues.

[0690] In another embodiment, a polypeptide of the invention, or polynucleotides, antibodies, agonists, or antagonists corresponding to that polypeptide, may be used to diagnose, prognose, prevent, and/or treat endocrine diseases and/or disorders associated with the tissue(s) in which the polypeptide of the invention is expressed, including one, two, three, four, five, or more tissues disclosed in Table 1A, column 7 (Tissue Distribution Library Code).

### Gastrointestinal Disorders

[0691] Polynucleotides or polypeptides, or agonists or antagonists of the present invention, may be used to treat, prevent, diagnose, and/or prognose gastrointestinal disorders, including inflammatory diseases and/or conditions, infections, cancers (e.g., intestinal neoplasms (carcinoid tumor of the small intestine, non-Hodgkin's lymphoma of the small intestine, small bowl lymphoma)), and ulcers, such as peptic ulcers.

[0692] Gastrointestinal disorders include dysphagia, odynophagia, inflammation of the esophagus, peptic esophagitis, gastric reflux, submucosal fibrosis and stricturing, Mallory-Weiss lesions, leiomyomas, lipomas, epidermal cancers, adeoncarcinomas, gastric retention disorders, gastroenteritis, gastric atrophy, gastric/stomach cancers, polyps of the stomach, autoimmune disorders such as pernicious anemia, pyloric stenosis, gastritis (bacterial, viral, eosinophilic, stress-induced, chronic erosive, atrophic, plasma cell, and Menetrier's), and peritoneal diseases (e.g., chyloperioneum, hemoperitoneum, mesenteric cyst, mesenteric lymphadenitis, mesenteric vascular occlusion, panniculitis, neoplasms, peritonitis, pneumoperitoneum, bubphrenic abscess).

[0693] Gastrointestinal disorders also include disorders associated with the small intestine, such as malabsorption syndromes, distension, irritable bowel syndrome, sugar intolerance, celiac disease, duodenal ulcers, duodenitis, tropical sprue, Whipple's disease, intestinal lymphangiectasia, Crohn's disease, appendicitis, obstructions of the ileum, Meckel's diverticulum, multiple diverticula, failure of complete rotation of the small and large intestine, lymphoma, and bacterial and parasitic diseases (such as Traveler's diarrhea, typhoid and paratyphoid, cholera, infection by Roundworms (Ascariasis lumbricoides), Hookworms (Ancylostoma duodenale), Threadworms (Enterobius vermicularis), Tapeworms (Taenia saginata, Echinococcus granulosus, Diphyllobothrium spp., and T. solium).

[0694] Liver diseases and/or disorders include intrahepatic cholestasis (alagille syndrome, biliary liver cirrhosis), fatty liver (alcoholic fatty liver, reye syndrome), hepatic vein thrombosis, hepatolentricular degeneration, hepatomegaly, hepatopulmonary syndrome, hepatorenal syndrome, portal hypertension (esophageal and gastric varices), liver abscess (amebic liver abscess), liver cirrhosis (alcoholic, biliary and experimental), alcoholic liver diseases (fatty liver, hepatitis, cirrhosis), parasitic (hepatic echinococcosis, fascioliasis, amebic liver abscess), jaundice (hemolytic, hepatocellular, and cholestatic), cholestasis, portal hypertension, liver enlargement, ascites, hepatitis (alcoholic hepatitis, animal hepatitis, chronic hepatitis (autoimmune, hepatitis B, hepatitis C, hepatitis D, drug induced), toxic hepatitis, viral human hepatitis (hepatitis A, hepatitis B, hepatitis C, hepatitis D, hepatitis E), Wilson's disease, granulomatous hepatitis, secondary biliary cirrhosis, hepatic encephalopathy, portal hypertension, varices, hepatic encephalopathy, primary biliary cirrhosis, primary sclerosing cholangitis, hepatocellular adenoma, hemangiomas, bile stones, liver failure (hepatic encephalopathy, acute liver failure), and liver neoplasms (angiomyolipoma, calcified liver metastases, cystic liver metastases, epithelial tumors, fibrolamellar hepatocarcinoma, focal nodular hyperplasia, hepatic adenoma, hepatobiliary cystadenoma, hepatoblastoma, hepatocellular carcinoma, hepatoma, liver cancer, liver hemangioendothelioma, mesenchymal hamartoma, mesenchymal tumors of liver, nodular regenerative hyperplasia, benign liver tumors (Hepatic cysts [Simple cysts, Polycystic liver disease, Hepatobiliary cystadenoma, Choledochal cyst], Mesenchymal tumors [Mesenchymal hamartoma, Infantile hemangioendothetioma, Hemangioma, Peliosis hepatis, Lipomas, Inflammatory pseudotumor, Miscellaneous], Epithelial tumors [Bile duct epithelium (Bile duct hamartoma, Bile duct adenoma), Hepatocyte (Adenoma, Focal nodular hyperplasia, Nodular regenerative hyperplasia)], malignant liver tumors [hepatocellular, hepatoblastoma, hepatocellular carcinoma, cholangiocellular, cholangiocarcinoma, cystadenocarcinoma, tumors of blood vessels, angiosarcoma, Karposi's sarcoma, hemangioendothelioma, other tumors, embryonal sarcoma, fibrosarcoma, leiomyosarcoma, rhabdomyosarcoma, carcinosarcoma, teratoma, carcinoid, squamous carcinoma, primary lymphoma]), peliosis hepatis, erythrohepatic porphyria, hepatic porphyria (acute intermittent porphyria, porphyria cutanea tarda), Zellweger syndrome).

[0695] Pancreatic diseases and/or disorders include acute pancreatitis, chronic pancreatitis (acute necrotizing pancreatitis, alcoholic pancreatitis), neoplasms (adenocarcinoma of the pancreas, cystadenocarcinoma, insulinoma, gastrinoma, and glucagonoma, cystic neoplasms, islet-cell tumors, pancreoblastoma), and other pancreatic diseases (e.g., cystic fibrosis, cyst (pancreatic pseudocyst, pancreatic fistula, insufficiency)).

[0696] Gallbladder diseases include gallstones (cholelithiasis and choledocholithiasis), postcholecystectomy syndrome, diverticulosis of the gallbladder, acute cholecystitis, chronic cholecystitis, bile duct tumors, and mucocele.

[0697] Diseases and/or disorders of the large intestine include antibiotic-associated colitis, diverticulitis, ulcerative colitis, acquired megacolon, abscesses, fungal and bacterial infections, anorectal disorders (e.g., fissures, hemorrhoids), colonic diseases (colitis, colonic neoplasms [colon cancer, adenomatous colon polyps (e.g., villous adenoma), colon carcinoma, colorectal cancer], colonic diverticulitis, colonic diverticulosis, megacolon [Hirschsprung disease, toxic megacolon]; sigmoid diseases [proctocolitis, sigmoin neoplasms]), constipation, Crohn's disease, diarrhea (infantile diarrhea, dysentery), duodenal diseases (duodenal neoplasms, duodenal obstruction, duodenal ulcer, duodenitis), enteritis (enterocolitis), HIV enteropathy, ileal diseases (ileal neoplasms, ileitis), immunoproliferative small intestinal disease, inflammatory bowel disease (ulcerative colitis, Crohn's disease), intestinal atresia, parasitic diseases (anisakiasis, balantidiasis, blastocystis infections, cryptosporidiosis, dientamoebiasis, amebic dysentery, giardiasis), intestinal fistula (rectal fistula), intestinal neoplasms (cecal neoplasms, colonic neoplasms, duodenal neoplasms, ileal neoplasms, intestinal polyps, jejunal neoplasms, rectal neoplasms), intestinal obstruction (afferent loop syndrome, duodenal obstruction, impacted feces, intestinal pseudo-obstruction [cecal volvulus], intussusception), intestinal perforation, intestinal polyps (colonic polyps, gardner syndrome, peutz-jeghers syndrome), jejunal diseases (jejunal neoplasms), malabsorption syndromes (blind loop syndrome, celiac disease, lactose intolerance, short bowl syndrome, tropical sprue, whipple's disease), mesenteric vascular occlusion, pneumatosis cystoides intestinalis, protein-losing enteropathies (intestinal lymphagiectasis), rectal diseases (anus diseases, fecal incontinence, hemorrhoids, proctitis, rectal fistula, rectal prolapse, rectocele), peptic ulcer (duodenal ulcer, peptic esophagitis, hemorrhage, perforation, stomach ulcer, Zollinger-Ellison syndrome), postgastrectomy syndromes (dumping syndrome), stomach diseases (e.g., achlorhydria, duodenogastric reflux (bile reflux), gastric antral vascular ectasia, gastric fistula, gastric outlet obstruction, gastritis (atrophic or hypertrophic), gastroparesis, stomach dilatation, stomach diverticulum, stomach neoplasms (gastric cancer, gastric polyps, gastric adenocarcinoma, hyperplastic gastric polyp), stomach rupture, stomach ulcer, stomach volvulus), tuberculosis, visceroptosis, vomiting (e.g., hematemesis, hyperemesis gravidarum, postoperative nausea and vomiting) and hemorrhagic colitis.

[0698] Further diseases and/or disorders of the gastrointestinal system include biliary tract diseases, such as, gastroschisis, fistula (e.g., biliary fistula, esophageal fistula, gastric fistula, intestinal fistula, pancreatic fistula), neoplasms (e.g., biliary tract neoplasms, esophageal neoplasms, such as adenocarcinoma of the esophagus, esophageal squamous cell carcinoma, gastrointestinal neoplasms, pancreatic neoplasms, such as adenocarcinoma of the pancreas, mucinous cystic neoplasm of the pancreas, pancreatic cystic neoplasms, pancreatoblastoma, and peritoneal neoplasms), esophageal disease (e.g., bullous diseases, candidiasis, glycogenic acanthosis, ulceration, barrett esophagus varices, atresia, cyst, diverticulum (e.g., Zenker's diverticulum), fistula (e.g., tracheoesophageal fistula), motility disorders (e.g., CREST syndrome, deglutition disorders, achalasia, spasm, gastroesophageal reflux), neoplasms, perforation (e.g., Boerhaave syndrome, Mallory-Weiss syndrome), stenosis, esophagitis, diaphragmatic hernia (e.g., hiatal hernia); gastrointestinal diseases, such as, gastroenteritis (e.g., cholera morbus, norwalk virus infection), hemorrhage (e.g., hematemesis, melena, peptic ulcer hemorrhage), stomach neoplasms (gastric cancer, gastric polyps, gastric adenocarcinoma, stomach cancer)), hernia (e.g., congenital diaphragmatic hernia, femoral hernia, inguinal hernia, obturator hernia, umbilical hernia, ventral hernia), and intestinal diseases (e.g., cecal diseases (appendicitis, cecal neoplasms)).

### Developmental and Inherited Disorders

[0699] Polynuceotides or polypeptides, or agonists or antagonists of the present invention may be used to treat, prevent, diagnose, and/or prognose diseases associated with mixed fetal tissues, including, but not limited to, developmental and inherited disorders or defects of the nervous system, musculoskelelal system, execretory system, cardiovascular system, hematopoietic system, gastrointestinal system, reproductive system, and respiratory system. Compositions of the present invention may also be used to treat, prevent, diagnose, and/or prognose developmental and inherited disorders or defects associated with, but not limited to, skin, hair, visual, and auditory tissues, metabolism. Additionally, the compositions of the invention may be useful in the diagnosis, treatment, and/or prevention of disorders or diseases associated with, but not limited to, chromosomal or genetic abnormalities and hyperproliferation or neoplasia.

[0700] Disorders or defects of the nervous system associated with developmental or inherited abnormalities that may be diagnosed, treated, and/or prevented with the compostions of the invention include, but are not limited to, adrenoleukodystrophy, agenesis of corpus callosum, Alexander disease, anencephaly, Angelman syndrome, Arnold-Chiari deformity, Batten disease, Canavan disease, cephalic disorders, Charcot-Marie-Tooth disease, encephalocele, Friedreich's ataxia, Gaucher's disease, Gorlin syndrome, Hallervorden-Spatz disease, hereditary spastic paraplegia, Huntington disease, hydranencephaly, hydrocephalus, Joubert syndrome, Lesch-Nyhan syndrome, leukodystrophy, Menkes disease, microcephaly, Niemann-Pick Type C1, neurofibromatosis, porencephaly, progeria, proteus syndrome, Refsum disease, spina bifida, Sturge-Weber syndrome, Tay-Sachs disease, tuberous sclerosis, and von Hippel-Lindau disease.

[0701] Developmental and inherited disorders resulting in disorders or defects of the musculoskeletal system that may be diagnosed, treated, and/or prevented with the compositions of the invention include, but are not limited to, achondroplasia, atlanto-occipital fusion, arthrogryposis mulitplex congenita, autosomal recessive muscular dystrophy, Becker's muscular dystrophy, cerebral palsy, choanal atresia, cleft lip, cleft palate, clubfoot, congenital amputation, congenital dislocation of the hip, congenital torticollis, congenital scoliosis, dopa-repsonsive dystonia, Duchenne muscular dystrophy, early-onset generalized dystonia, femoral torsion, Gorlin syndrome, hypophosphatasia, Klippel-Feil syndrome, knee dislocation, myoclonic dystonia, myotonic dystrophy, nail-patella syndrome, osteogenesis imperfecta, paroxysmal dystonia, progeria, prune-belly syndrome, rapid-onset dystonia parkinsonism, scolosis, syndactyly, Treacher Collins' syndrome, velocardiofacial syndrome, and X-linked dystonia-parkinsonism.

[0702] Developmental or hereditary disorders or defects of the excretory system that may be diagnosed, treated, and/or prevented with the compositions of the invention include, but are not limited to, Alport's syndrome, Bartter's syndrome, bladder diverticula, bladder exstrophy, cystinuria, epispadias, Fanconi's syndrome, Hartnup disease, horseshoe kidney, hypospadias, kidney agenesis, kidney ectopia, kidney malrotation, Liddle's syndrome, medullary cystic disease, medullary sponge, multicystic kidney, kidney polycystic kidney disease, nail-patella syndrome, Potter's syndrome, urinary-tract flow obstruction, vitamin D-resistant rickets, and Wilm's tumor.

[0703] Cardiovascular disorders or defects of developmental or hereditary origin that may be diagnosed, treated, and/or prevented with the compositions of the invention include, but are not limited to, aortic valve stenosis, atrial septal defects, artioventricular (A-V) canal defect, bicuspid aortic valve, coarctation or the aorta, dextrocardia, Ebstein's anomaly, Eisenmenger's complex, hypoplastic left heart syndrome, Marfan syndrome, patent ductus arteriosus, progeria, pulmonary atresia, pulmonary valve stenosis, subaortic stenosis, tetralogy of fallot, total anomalous pulmonary venous (P-V) connection, transposition of the great arteries, tricuspid atresia, truncus arteriosus, ventricular septal defects. Developmental or inherited disorders resulting in disorders involving the hematopoietic system that may be diagnosed, treated, and/or prevented with the compositions of the invention include, but not limited to, Bernard-Soulier syndrome, Chédiak-Higashi syndrome, hemophilia, Hermansky-Pudlak syndrome, sickle cell anemia, storage pool disease, thromboxane A2 dysfunction, thrombasthenia, and von Willebrand's disease.

[0704] The compositions of the invention may also be used to diagnose, treat, and/or prevent developmental and inherited disorders resulting in disorders or defects of the gastrointestinal system, including, but not limited to, anal atresia, biliary atresia, esophageal atresia, diaphragmatic hernia, Hirschsprung's disease, Meckel's diverticulum, oligohydramnios, omphalocele, polyhydramnios, porphyria, situs inversus viscera. Developmental or inherited disorders resulting in metabolic disorders that may be diagnosed, treated, and/or prevented with the compositions of the invention include, but are not limited to, alpha-1 antitrypsin deficiency, cystic fibrosis, hemochromatosis, lysosomal storage disease, phenylketonuria, Wilson's disease, and Zellweger syndrome.

[0705] Disorders of the reproductive system that are developmentally or hereditary related that may also be diagnosed, treated, and/or prevented with the compositions of the invention include, but are not limited to, androgen insensitivity syndrome, ambiguous genitalia, autosomal sex reversal, congenital adreneal hyperplasia, gonadoblastoma, ovarian germ cell cancer, pseudohermphroditism, true hermaphroditism, undescended testis, XX male syndrome, and XY female type gonadal dysgenesis. The compositions of the invention may also be used to diagnose, treat, and/or prevent developmental or inherited respiratory defects including, but not limited to, askin tumor, azygos lobe, congenital diaphragmatic hernia, congenital lobar emphysema, cystic adenomatoid malformation, lobar emphysema, hyaline membrane disease, and pectus excavatum.

[0706] Developmental or inherited disorders may also result from chromosomal or genetic aberration that may be diagnosed, treated, and/or prevented with the compositions of the invention including, but not limited to, 4p-syndrome, cri du chat syndrome, Digeorge syndrome, Down's syndrome, Edward's syndrome, fragile X syndrome, Klinefelter's syndrome, Patau's syndrome, Prader-Willi syndrome, progeria, Turner's syndrome, triple X syndrome, and XYY syndrome. Other developmental disorders that can be diagnosed, treated, and/or prevented with the compositions of the invention, include, but are not limited to, fetal alcohol syndrome, and can be caused by environmental factors surrounding the developing fetus.

[0707] The compositions of the invention may further be able to be used to diagnose, treat, and/or prevent errors in development or a genetic disposition that may result in hyperproliferative disorders or neoplasms, including, but not limited to, acute childhood lymphoblastic leukemia, askin tumor, Beckwith-Wiedemann syndrome, childhood acute myeloid leukemia, childhood brain stem glioma, childhood cerebellar astrocytoma, childhood extracranial germ cell tumors childhood (primary), gonadoblastoma, hepatocellular cancer, childhood Hodgkin's disease, childhood Hodgkin's lymphoma, childhood hypothalamic and visual pathway glioma, childhood (primary) liver cancer, childhood lymphoblastic leukemia, childhood medulloblastoma, childhood non-Hodgkin's lymphoma, childhood pineal and supratentorial primitive neuroectodermal tumors, childhood primary liver cancer, childhood rhabdomyosarcoma, childhood soft tissue sarcoma, Gorlin syndrome, familial multiple endrocrine neoplasia type I, neuroblastoma, ovarian germ cell cancer, pheochromocytoma, retinoblastoma, and Wilm's tumor.

[0708] Polypeptides may be administered using any method known in the art, including, but not limited to, direct needle injection at the delivery site, intravenous injection, topical administration, catheter infusion, biolistic injectors, particle accelerators, gelfoam sponge depots, other commercially available depot materials, osmotic pumps, oral or suppositorial solid pharmaceutical formulations, decanting or topical applications during surgery, aerosol delivery. Such methods are known in the art. Polypeptides may be administered as part of a Therapeutic, described in more detail below. Methods of delivering polynucleotides are described in more detail herein.

### Diseases at the Cellular Level

[0709] Diseases associated with increased cell survival or the inhibition of apoptosis that could be treated, prevented, diagnosed and/or prognosed using polynucleotides or polypeptides, as well as antagonists or agonists of the present invention, include cancers (such as follicular lymphomas, carcinomas with p53 mutations, and hormone-dependent tumors, including, but not limited to colon cancer, cardiac tumors, pancreatic cancer, melanoma, retinoblastoma, glioblastoma, lung cancer, intestinal cancer, testicular cancer, stomach cancer, neuroblastoma, myxoma, myoma, lymphoma, endothelioma, osteoblastoma, osteoclastoma, osteosarcoma, chondrosarcoma, adenoma, breast cancer, prostate cancer, Kaposi's sarcoma and ovarian cancer); autoimmune disorders (such as, multiple sclerosis, Sjogren's syndrome, Hashimoto's thyroiditis, biliary cirrhosis, Behcet's disease, Crohn's disease, polymyositis, systemic lupus erythematosus and immune-related glomerulonephritis and rheumatoid arthritis) and viral infections (such as herpes viruses, pox viruses and adenoviruses), inflammation, graft v. host disease, acute graft rejection, and chronic graft rejection.

[0710] In preferred embodiments, polynucleotides, polypeptides, and/or antagonists of the invention are used to inhibit growth, progression, and/or metastasis of cancers, in particular those [listed above] involving prostate tissues.

[0711] Additional diseases or conditions associated with increased cell survival that could be treated or detected by polynucleotides or polypeptides, or agonists or antagonists of the present invention include, but are not limited to, progression, and/or metastases of malignancies and related disorders such as leukemia (including acute leukemias (e.g., acute lymphocytic leukemia, acute myelocytic leukemia (including myeloblastic, promyelocytic, myelomonocytic, monocytic, and erythroleukemia)) and chronic leukemias (e.g., chronic myelocytic (granulocytic) leukemia and chronic lymphocytic leukemia)), polycythemia vera, lymphomas (e.g., Hodgkin's disease and non-Hodgkin's disease), multiple myeloma, Waldenstrom's macroglobulinemia, heavy chain disease, and solid tumors including, but not limited to, sarcomas and carcinomas such as fibrosarcoma, myxosarcoma, liposarcoma, chondrosarcoma, osteogenic sarcoma, chordoma, angiosarcoma, endotheliosarcoma, lymphangiosarcoma, lymphangioendotheliosarcoma, synovioma, mesothelioma, Ewing's tumor, leiomyosarcoma, rhabdomyosarcoma, colon carcinoma, pancreatic cancer, breast cancer, ovarian cancer, prostate cancer, squamous cell carcinoma, basal cell carcinoma, adenocarcinoma, sweat gland carcinoma, sebaceous gland carcinoma, papillary carcinoma, papillary adenocarcinomas, cystadenocarcinoma, medullary carcinoma, bronchogenic carcinoma, renal cell carcinoma, hepatoma, bile duct carcinoma, choriocarcinoma, seminoma, embryonal carcinoma, Wilm's tumor, cervical cancer, testicular tumor, lung carcinoma, small cell lung carcinoma, bladder carcinoma, epithelial carcinoma, glioma, astrocytoma, medulloblastoma, craniopharyngioma, ependymoma, pinealoma, hemangioblastoma, acoustic neuroma, oligodendroglioma, menangioma, melanoma, neuroblastoma, and retinoblastoma.

[0712] Diseases associated with increased apoptosis that could be treated, prevented, diagnosted, and/or prognosed using polynucleotides or polypeptides, as well as agonists or antagonists of the present invention, include, but are not limited to, AIDS; neurodegenerative disorders (such as Alzheimer's disease, Parkinson's disease, Amyotrophic lateral sclerosis, Retinitis pigmentosa, Cerebellar degeneration and brain tumor or prior associated disease); autoimmune disorders (such as, multiple sclerosis, Sjogren's syndrome, Hashimoto's thyroiditis, biliary cirrhosis, Behcet's disease, Crohn's disease, polymyositis, systemic lupus erythematosus and immune-related glomerulonephritis and rheumatoid arthritis) myelodysplastic syndromes (such as aplastic anemia), graft v. host disease, ischemic injury (such as that caused by myocardial infarction, stroke and reperfusion injury), liver injury (e.g., hepatitis related liver injury, ischemia/reperfusion injury, cholestosis (bile duct injury) and liver cancer); toxin-induced liver disease (such as that caused by alcohol), septic shock, cachexia and anorexia.

### Wound Healing and Epithelial Cell Proliferation

[0713] In accordance with yet a further aspect of the present invention, there is provided a process for utilizing polynucleotides or polypeptides, as well as agonists or antagonists of the present invention, for therapeutic purposes, for example, to stimulate epithelial cell proliferation and basal keratinocytes for the purpose of wound healing, and to stimulate hair follicle production and healing of dermal wounds. Polynucleotides or polypeptides, as well as agonists or antagonists of the present invention, may be clinically useful in stimulating wound healing including surgical wounds, excisional wounds, deep wounds involving damage of the dermis and epidermis, eye tissue wounds, dental tissue wounds, oral cavity wounds, diabetic ulcers, dermal ulcers, cubitus ulcers, arterial ulcers, venous stasis ulcers, burns resulting from heat exposure or chemicals, and other abnormal wound healing conditions such as uremia, malnutrition, vitamin deficiencies and complications associated with systemic treatment with steroids, radiation therapy and antineoplastic drugs and antimetabolites. Polynucleotides or polypeptides, as well as agonists or antagonists of the present invention, could be used to promote dermal reestablishment subsequent to dermal loss.

[0714] Polynucleotides or polypeptides, as well as agonists or antagonists of the present invention, could be used to increase the adherence of skin grafts to a wound bed and to stimulate re-epithelialization from the wound bed. The following are types of grafts that polynucleotides or polypeptides, agonists or antagonists of the present invention, could be used to increase adherence to a wound bed: autografts, artificial skin, allografts, autodermic graft, autoepdermic grafts, avacular grafts, Blair-Brown grafts, bone graft, brephoplastic grafts, cutis graft, delayed graft, dermic graft, epidermic graft, fascia graft, full thickness graft, heterologous graft, xenograft, homologous graft, hyperplastic graft, lamellar graft, mesh graft, mucosal graft, Ollier-Thiersch graft, omenpal graft, patch graft, pedicle graft, penetrating graft, split skin graft, thick split graft. Polynucleotides or polypeptides, as well as agonists or antagonists of the present invention, can be used to promote skin strength and to improve the appearance of aged skin.

[0715] It is believed that polynucleotides or polypeptides, as well as agonists or antagonists of the present invention, will also produce changes in hepatocyte proliferation, and epithelial cell proliferation in the lung, breast, pancreas, stomach, small intestine, and large intestine. Polynucleotides or polypeptides, as well as agonists or antagonists of the present invention, could promote proliferation of epithelial cells such as sebocytes, hair follicles, hepatocytes, type II pneumocytes, mucin-producing goblet cells, and other epithelial cells and their progenitors contained within the skin, lung, liver, and gastrointestinal tract. Polynucleotides or polypeptides, agonists or antagonists of the present invention, may promote proliferation of endothelial cells, keratinocytes, and basal keratinocytes.

[0716] Polynucleotides or polypeptides, as well as agonists or antagonists of the present invention, could also be used to reduce the side effects of gut toxicity that result from radiation, chemotherapy treatments or viral infections. Polynucleotides or polypeptides, as well as agonists or antagonists of the present invention, may have a cytoprotective effect on the small intestine mucosa. Polynucleotides or polypeptides, as well as agonists or antagonists of the present invention, may also stimulate healing of mucositis (mouth ulcers) that result from chemotherapy and viral infections.

[0717] Polynucleotides or polypeptides, as well as agonists or antagonists of the present invention, could further be used in full regeneration of skin in full and partial thickness skin defects, including burns, (i.e., repopulation of hair follicles, sweat glands, and sebaceous glands), treatment of other skin defects such as psoriasis. Polynucleotides or polypeptides, as well as agonists or antagonists of the present invention, could be used to treat epidermolysis bullosa, a defect in adherence of the epidermis to the underlying dermis which results in frequent, open and painful blisters by accelerating reepithelialization of these lesions. Polynucleotides or polypeptides, as well as agonists or antagonists of the present invention, could also be used to treat gastric and doudenal ulcers and help heal by scar formation of the mucosal lining and regeneration of glandular mucosa and duodenal mucosal lining more rapidly. Inflammatory bowel diseases, such as Crohn's disease and ulcerative colitis, are diseases, which result in destruction of the mucosal surface of the small or large intestine, respectively. Thus, polynucleotides or polypeptides, as well as agonists or antagonists of the present invention, could be used to promote the resurfacing of the mucosal surface to aid more rapid healing and to prevent progression of inflammatory bowel disease. Treatment with polynucleotides or polypeptides, agonists or antagonists of the present invention, is expected to have a significant effect on the production of mucus throughout the gastrointestinal tract and could be used to protect the intestinal mucosa from injurious substances that are ingested or following surgery. Polynucleotides or polypeptides, as well as agonists or antagonists of the present invention, could be used to treat diseases associate with the under expression.

[0718] Moreover, polynucleotides or polypeptides, as well as agonists or antagonists of the present invention, could be used to prevent and heal damage to the lungs due to -various pathological states. Polynucleotides or polypeptides, as well as agonists or antagonists of the present invention, could stimulate proliferation and differentiation and promote the repair of alveoli and brochiolar epithelium to prevent or treat acute or chronic lung damage. For example, emphysema, which results in the progressive loss of aveoli, and inhalation injuries, i.e., resulting from smoke inhalation and burns, that cause necrosis of the bronchiolar epithelium and alveoli could be effectively treated using polynucleotides or polypeptides, agonists or antagonists of the present invention. Also, polynucleotides or polypeptides, as well as agonists or antagonists of the present invention, could be used to stimulate the proliferation of and differentiation of type II pneumocytes, which may help treat or prevent disease such as hyaline membrane diseases, such as infant respiratory distress syndrome and bronchopulmonary displasia, in premature infants.

[0719] Polynucleotides or polypeptides, as well as agonists or antagonists of the present invention, could stimulate the proliferation and differentiation of hepatocytes and, thus, could be used to alleviate or treat liver diseases and pathologies such as fulminant liver failure caused by cirrhosis, liver damage caused by viral hepatitis and toxic substances (i.e., acetaminophen, carbon tetraholoride and other hepatotoxins known in the art).

[0720] In addition, polynucleotides or polypeptides, as well as agonists or antagonists of the present invention, could be used treat or prevent the onset of diabetes mellitus. In patients with newly diagnosed Types I and II diabetes, where some islet cell function remains, polynucleotides or polypeptides, as well as agonists or antagonists of the present invention, could be used to maintain the islet function so as to alleviate, delay or prevent permanent manifestation of the disease. Also, polynucleotides or polypeptides, as well as agonists or antagonists of the present invention, could be used as an auxiliary in islet cell transplantation to improve or promote islet cell function.

### Infectious Disease

[0721] Polynucleotides or polypeptides, as well as agonists or antagonists of the present invention can be used to treat or detect infectious agents. For example, by increasing the immune response, particularly increasing the proliferation and differentiation of B and/or T cells, infectious diseases may be treated. The immune response may be increased by either enhancing an existing immune response, or by initiating a new immune response. Alternatively, polynucleotides or polypeptides, as well as agonists or antagonists of the present invention may also directly inhibit the infectious agent, without necessarily eliciting an immune response.

[0722] Viruses are one example of an infectious agent that can cause disease or symptoms that can be treated or detected by a polynucleotide or polypeptide and/or agonist or antagonist of the present invention. Examples of viruses, include, but are not limited to Examples of viruses, include, but are not limited to the following DNA and RNA viruses and viral families: Arbovirus, Adenoviridae, Arenaviridae, Arterivirus, Birnaviridae, Bunyaviridae, Caliciviridae, Circoviridae, Coronaviridae, Dengue, EBV, HIV, Flaviviridae, Hepadnaviridae (Hepatitis), Herpesviridae (such as, Cytomegalovirus, Herpes Simplex, Herpes Zoster), Mononegavirus (e.g., Paramyxoviridae, Morbillivirus, Rhabdoviridae), Orthomyxoviridae (e.g., Influenza A, Influenza B, and parainfluenza), Papiloma virus, Papovaviridae, Parvoviridae, Picornaviridae, Poxviridae (such as Smallpox or Vaccinia), Reoviridae (e.g., Rotavirus), Retroviridae (HTLV-I, HTLV-II, Lentivirus), and Togaviridae (e.g., Rubivirus). Viruses falling within these families can cause a variety of diseases or symptoms, including, but not limited to: arthritis, bronchiollitis, respiratory syncytial virus, encephalitis, eye infections (e.g., conjunctivitis, keratitis), chronic fatigue syndrome, hepatitis (A, B, C, E, Chronic Active, Delta), Japanese B encephalitis, Junin, Chikungunya, Rift Valley fever, yellow fever, meningitis, opportunistic infections (e.g., AIDS), pneumonia, Burkitt's Lymphoma, chickenpox, hemorrhagic fever, Measles, Mumps, Parainfluenza, Rabies, the common cold, Polio, leukemia, Rubella, sexually transmitted diseases, skin diseases (e.g., Kaposi's, warts), and viremia. polynucleotides or polypeptides, or agonists or antagonists of the invention, can be used to treat or detect any of these symptoms or diseases. In specific embodiments, polynucleotides, polypeptides, or agonists or antagonists of the invention are used to treat: meningitis, Dengue, EBV, and/or hepatitis (e.g., hepatitis B). In an additional specific embodiment polynucleotides, polypeptides, or agonists or antagonists of the invention are used to treat patients nonresponsive to one or more other commercially available hepatitis vaccines. In a further specific embodiment polynucleotides, polypeptides, or agonists or antagonists of the invention are used to treat AIDS.

[0723] Similarly, bacterial or fungal agents that can cause disease or symptoms and that can be treated or detected by a polynucleotide or polypeptide and/or agonist or antagonist of the present invention include, but not limited to, include, but not limited to, the following Gram-Negative and Gram-positive bacteria and bacterial families and fungi: Actinomycetales (e.g., Corynebacterium, Mycobacterium, Norcardia), Cryptococcus neoformans, Aspergillosis, Bacillaceae (e.g., Anthrax, Clostridium), Bacteroidaceae, Blastomycosis, Bordetella, Borrelia (e.g., Borrelia burgdorferi, Brucellosis, Candidiasis, Campylobacter, Coccidioidomycosis, Cryptococcosis, Dermatocycoses, E. coli (e.g., Enterotoxigenic E. coli and Enterohemorrhagic E. coli), Enterobacteriaceae (Klebsiella, Salmonella (e.g., Salmonella typhi, and Salmonella paratyphi), Serratia, Yersinia), Erysipelothrix, Helicobacter, Legionellosis, Leptospirosis, Listeria, Mycoplasmatales, Mycobacterium leprae, Vibrio cholerae, Neisseriaceae (e.g., Acinetobacter, Gonorrhea, Menigococcal), Meisseria meningitidis, Pasteurellacea Infections (e.g., Actinobacillus, Heamophilus (e.g., Heamophilus influenza type B), Pasteurella), Pseudomonas, Rickettsiaceae, Chlamydiaceae, Treponema spp., Leptospira spp., Shigella spp., Staphylococcal, Meningiococcal, Pneumococcal and Streptococcal (e.g., Streptococcus pneumoniae and Group B Streptococcus). These bacterial or fungal families can cause the following diseases or symptoms, including, but not limited to: bacteremia, endocarditis, eye infections (conjunctivitis, tuberculosis, uveitis), gingivitis, opportunistic infections (e.g., AIDS related infections), paronychia, prosthesis-related infections, Reiter's Disease, respiratory tract infections, such as Whooping Cough or Empyema, sepsis, Lyme Disease, Cat-Scratch Disease, Dysentery, Paratyphoid Fever, food poisoning, Typhoid, pneumonia, Gonorrhea, meningitis (e.g., mengitis types A and B), Chlamydia, Syphilis, Diphtheria, Leprosy, Paratuberculosis, Tuberculosis, Lupus, Botulism, gangrene, tetanus, impetigo, Rheumatic Fever, Scarlet Fever, sexually transmitted diseases, skin diseases (e.g., cellulitis, dermatocycoses), toxemia, urinary tract infections, wound infections. Polynucleotides or polypeptides, agonists or antagonists of the invention, can be used to treat or detect any of these symptoms or diseases. In specific embodiments, Ppolynucleotides, polypeptides, agonists or antagonists of the invention are used to treat: tetanus, Diptheria, botulism, and/or meningitis type B.

[0724] Moreover, parasitic agents causing disease or symptoms that can be treated or detected by a polynucleotide or polypeptide and/or agonist or antagonist of the present invention include, but not limited to, the following families or class: Amebiasis, Babesiosis, Coccidiosis, Cryptosporidiosis, Dientamoebiasis, Dourine, Ectoparasitic, Giardiasis, Helminthiasis, Leishmaniasis, Theileriasis, Toxoplasmosis, Trypanosomiasis, and Trichomonas and Sporozoans (e.g., Plasmodium virax, Plasmodium falciparium, Plasmodium malariae and Plasmodium ovale). These parasites can cause a variety of diseases or symptoms, including, but not limited to: Scabies, Trombiculiasis, eye infections, intestinal disease (e.g., dysentery, giardiasis), liver disease, lung disease, opportunistic infections (e.g., AIDS related), malaria, pregnancy complications, and toxoplasmosis. polynucleotides or polypeptides, or agonists or antagonists of the invention, can be used to treat or detect any of these symptoms or diseases.

[0725] Polynucleotides or polypeptides, as well as agonists or antagonists of the present invention of the present invention could either be by administering an effective amount of a polypeptide to the patient, or by removing cells from the patient, supplying the cells with a polynucleotide of the present invention, and returning the engineered cells to the patient (ex vivo therapy). Moreover, the polypeptide or polynucleotide of the present invention can be used as an antigen in a vaccine to raise an immune response against infectious disease.

### Regeneration

[0726] Polynucleotides or polypeptides, as well as agonists or antagonists of the present invention can be used to differentiate, proliferate, and attract cells, leading to the regeneration of tissues. (See, Science 276:59-87 (1997).) The regeneration of tissues could be used to repair, replace, or protect tissue damaged by congenital defects, trauma (wounds, bums, incisions, or ulcers), age, disease (e.g. osteoporosis, osteocarthritis, periodontal disease, liver failure), surgery, including cosmetic plastic surgery, fibrosis, reperfusion injury, or systemic cytokine damage.

[0727] Tissues that could be regenerated using the present invention include organs (e.g., pancreas, liver, intestine, kidney, skin, endothelium), muscle (smooth, skeletal or cardiac), vasculature (including vascular and lymphatics), nervous, hematopoietic, and skeletal (bone, cartilage, tendon, and ligament) tissue. Preferably, regeneration occurs without or decreased scarring. Regeneration also may include angiogenesis.

[0728] Moreover, polynucleotides or polypeptides, as well as agonists or antagonists of the present invention, may increase regeneration of tissues difficult to heal. For example, increased tendon/ligament regeneration would quicken recovery time after damage. Polynucleotides or polypeptides, as well as agonists or antagonists of the present invention could also be used prophylactically in an effort to avoid damage. Specific diseases that could be treated include of tendinitis, carpal tunnel syndrome, and other tendon or ligament defects. A further example of tissue regeneration of non-healing wounds includes pressure ulcers, ulcers associated with vascular insufficiency, surgical, and traumatic wounds.

[0729] Similarly, nerve and brain tissue could also be regenerated by using polynucleotides or polypeptides, as well as agonists or antagonists of the present invention, to proliferate and differentiate nerve cells. Diseases that could be treated using this method include central and peripheral nervous system diseases, neuropathies, or mechanical and traumatic disorders (e.g., spinal cord disorders, head trauma, cerebrovascular disease, and stoke). Specifically, diseases associated with peripheral nerve injuries, peripheral neuropathy (e.g., resulting from chemotherapy or other medical therapies), localized neuropathies, and central nervous system diseases (e.g., Alzheimer's disease, Parkinson's disease, Huntington's disease, amyotrophic lateral sclerosis, and Shy-Drager syndrome), could all be treated using the polynucleotides or polypeptides, as well as agonists or antagonists of the present invention.

### Chemotaxis

[0730] Polynucleotides or polypeptides, as well as agonists or antagonists of the present invention may have chemotaxis activity. A chemotaxic molecule attracts or mobilizes cells (e.g., monocytes, fibroblasts, neutrophils, T-cells, mast cells, eosinophils, epithelial and/or endothelial cells) to a particular site in the body, such as inflammation, infection, or site of hyperproliferation. The mobilized cells can then fight off and/or heal the particular trauma or abnormality.

[0731] Polynucleotides or polypeptides, as well as agonists or antagonists of the present invention may increase chemotaxic activity of particular cells. These chemotactic molecules can then be used to treat inflammation, infection, hyperproliferative disorders, or any immune system disorder by increasing the number of cells targeted to a particular location in the body. For example, chemotaxic molecules can be used to treat wounds and other trauma to tissues by attracting immune cells to the injured location. Chemotactic molecules of the present invention can also attract fibroblasts, which can be used to treat wounds.

[0732] It is also contemplated that polynucleotides or polypeptides, as well as agonists or antagonists of the present invention may inhibit chemotactic activity. These molecules could also be used to treat disorders. Thus, polynucleotides or polypeptides, as well as agonists or antagonists of the present invention could be used as an inhibitor of chemotaxis.

### Binding Activity

[0733] A polypeptide of the present invention may be used to screen for molecules that bind to the polypeptide or for molecules to which the polypeptide binds. The binding of the polypeptide and the molecule may activate (agonist), increase, inhibit (antagonist), or decrease activity of the polypeptide or the molecule bound. Examples of such molecules include antibodies, oligonucleotides, proteins (e.g., receptors), or small molecules.

[0734] Preferably, the molecule is closely related to the natural ligand of the polypeptide, e.g., a fragment of the ligand, or a natural substrate, a ligand, a structural or functional mimetic. (See, Coligan et al., Current Protocols in Immunology 1(2):Chapter 5 (1991).) Similarly, the molecule can be closely related to the natural receptor to which the polypeptide binds, or at least, a fragment of the receptor capable of being bound by the polypeptide (e.g., active site). In either case, the molecule can be rationally designed using known techniques.

[0735] Preferably, the screening for these molecules involves producing appropriate cells, which express the polypeptide. Preferred cells include cells from mammals, yeast, Drosophila, or E. coli. Cells expressing the polypeptide (or cell membrane containing the expressed polypeptide) are then preferably contacted with a test compound potentially containing the molecule to observe binding, stimulation, or inhibition of activity of either the polypeptide or the molecule.

[0736] The assay may simply test binding of a candidate compound to the polypeptide, wherein binding is detected by a label, or in an assay involving competition with a labeled competitor. Further, the assay may test whether the candidate compound results in a signal generated by binding to the polypeptide.

[0737] Alternatively, the assay can be carried out using cell-free preparations, polypeptide/molecule affixed to a solid support, chemical libraries, or natural product mixtures. The assay may also simply comprise the steps of mixing a candidate compound with a solution containing a polypeptide, measuring polypeptide/molecule activity or binding, and comparing the polypeptide/molecule activity or binding to a standard.

[0738] Preferably, an ELISA assay can measure polypeptide level or activity in a sample (e.g., biological sample) using a monoclonal or polyclonal antibody. The antibody can measure polypeptide level or activity by either binding, directly or indirectly, to the polypeptide or by competing with the polypeptide for a substrate.

[0739] Additionally, the receptor to which the polypeptide of the present invention binds can be identified by numerous methods known to those of skill in the art, for example, ligand panning and FACS sorting (Coligan, et al., Current Protocols in Immun., 1(2), Chapter 5, (1991)). For example, expression cloning is employed wherein polyadenylated RNA is prepared from a cell responsive to the polypeptides, for example, NIH3T3 cells which are known to contain multiple receptors for the FGF family proteins, and SC-3 cells, and a cDNA library created from this RNA is divided into pools and used to transfect COS cells or other cells that are not responsive to the polypeptides. Transfected cells which are grown on glass slides are exposed to the polypeptide of the present invention, after they have been labeled. The polypeptides can be labeled by a variety of means including iodination or inclusion of a recognition site for a site-specific protein kinase.

[0740] Following fixation and incubation, the slides are subjected to auto-radiographic analysis. Positive pools are identified and sub-pools are prepared and re-transfected using an iterative sub-pooling and re-screening process, eventually yielding a single clones that encodes the putative receptor.

[0741] As an alternative approach for receptor identification, the labeled polypeptides can be photoaffinity linked with cell membrane or extract preparations that express the receptor molecule. Cross-linked material is resolved by PAGE analysis and exposed to X-ray film. The labeled complex containing the receptors of the polypeptides can be excised, resolved into peptide fragments, and subjected to protein microsequencing. The amino acid sequence obtained from microsequencing would be used to design a set of degenerate oligonucleotide probes to screen a cDNA library to identify the genes encoding the putative receptors.

[0742] Moreover, the techniques of gene-shuffling, motif-shuffling, exon-shuffling, and/or codon-shuffling (collectively referred to as “DNA shuffling”) may be employed to modulate the activities of the polypeptide of the present invention thereby effectively generating agonists and antagonists of the polypeptide of the present invention. See generally, U.S. Pat. Nos. 5,605,793, 5,811,238, 5,830,721, 5,834,252, and 5,837,458, and Patten, P. A., et al., Curr. Opinion Biotechnol. 8:724-33 (1997); Harayama, S. Trends Biotechnol. 16(2):76-82 (1998); Hansson L. O., et al., J. Mol. Biol. 287:265-76 (1999); and Lorenzo, M. M. and Blasco, R. Biotechniques 24(2):308-13 (1998); each of these patents and publications are hereby incorporated by reference). In one embodiment, alteration of polynucleotides and corresponding polypeptides may be achieved by DNA shuffling. DNA shuffling involves the assembly of two or more DNA segments into a desired molecule by homologous, or site-specific, recombination. In another embodiment, polynucleotides and corresponding polypeptides may be altered by being subjected to random mutagenesis by error-prone PCR, random nucleotide insertion or other methods prior to recombination. In another embodiment, one or more components, motifs, sections, parts, domains, fragments, etc., of the polypeptide of the present invention may be recombined with one or more components, motifs, sections, parts, domains, fragments, etc. of one or more heterologous molecules. In preferred embodiments, the heterologous molecules are family members. In further preferred embodiments, the heterologous molecule is a growth factor such as, for example, platelet-derived growth factor (PDGF), insulin-like growth factor (IGF-I), transforming growth factor (TGF)-alpha, epidermal growth factor (EGF), fibroblast growth factor (FGF), TGF-beta, bone morphogenetic protein (BMP)-2, BMP-4, BMP-5, BMP-6, BMP-7, activins A and B, decapentaplegic(dpp), 60A, OP-2, dorsalin, growth differentiation factors (GDFs), nodal, MIS, inhibin-alpha, TGF-beta1, TGF-beta2, TGF-beta3, TGF-beta5, and glial-derived neurotrophic factor (GDNF).

[0743] Other preferred fragments are biologically active fragments of the polypeptide of the present invention. Biologically active fragments are those exhibiting activity similar, but not necessarily identical, to an activity of the polypeptide of the present invention. The biological activity of the fragments may include an improved desired activity, or a decreased undesirable activity.

[0744] Additionally, this invention provides a method of screening compounds to identify those, which modulate the action of the polypeptide of the present invention. An example of such an assay comprises combining a mammalian fibroblast cell, the polypeptide of the present invention, the compound to be screened and ³[H] thymidine under cell culture conditions where the fibroblast cell would normally proliferate. A control assay may be performed in the absence of the compound to be screened and compared to the amount of fibroblast proliferation in the presence of the compound to determine if the compound stimulates proliferation by determining the uptake of 3[H] thymidine in each case. The amount of fibroblast cell proliferation is measured by liquid scintillation chromatography, which measures the incorporation of ³[H] thymidine. Both agonist and antagonist compounds may be identified by this procedure.

[0745] In another method, a mammalian cell or membrane preparation expressing a receptor for a polypeptide of the present invention is incubated with a labeled polypeptide of the present invention in the presence of the compound. The ability of the compound to enhance or block this interaction could then be measured. Alternatively, the response of a known second messenger system following interaction of a compound to be screened and the receptor is measured and the ability of the compound to bind to the receptor and elicit a second messenger response is measured to determine if the compound is a potential agonist or antagonist. Such second messenger systems include but are not limited to, cAMP guanylate cyclase, ion channels or phosphoinositide hydrolysis.

[0746] All of these above assays can be used as diagnostic or prognostic markers. The molecules discovered using these assays can be used to treat disease or to bring about a particular result in a patient (e.g., blood vessel growth) by activating or inhibiting the polypeptide/molecule. Moreover, the assays can discover agents which may inhibit or enhance the production of the polypeptides of the invention from suitably manipulated cells or tissues.

[0747] Therefore, the invention includes a method of identifying compounds which bind to a polypeptide of the invention comprising the steps of: (a) incubating a candidate binding compound with a polypeptide of the present invention; and (b) determining if binding has occurred. Moreover, the invention includes a method of identifying agonists/antagonists comprising the steps of: (a) incubating a candidate compound with a polypeptide of the present invention, (b) assaying a biological activity, and (b) determining if a biological activity of the polypeptide has been altered.

### Targeted Delivery

[0748] In another embodiment, the invention provides a method of delivering compositions to targeted cells expressing a receptor for a polypeptide of the invention, or cells expressing a cell bound form of a polypeptide of the invention.

[0749] As discussed herein, polypeptides or antibodies of the invention may be associated with heterologous polypeptides, heterologous nucleic acids, toxins, or prodrugs via hydrophobic, hydrophilic, ionic and/or covalent interactions. In one embodiment, the invention provides a method for the specific delivery of compositions of the invention to cells by administering polypeptides of the invention (including antibodies) that are associated with heterologous polypeptides or nucleic acids. In one example, the invention provides a method for delivering a therapeutic protein into the targeted cell. In another example, the invention provides a method for delivering a single stranded nucleic acid (e.g., antisense or ribozymes) or double stranded nucleic acid (e.g., DNA that can integrate into the cell's genome or replicate episomally and that can be transcribed) into the targeted cell.

[0750] In another embodiment, the invention provides a method for the specific destruction of cells (e.g., the destruction of tumor cells) by administering polypeptides of the invention (e.g., polypeptides of the invention or antibodies of the invention) in association with toxins or cytotoxic prodrugs.

[0751] By “toxin” is meant compounds that bind and activate endogenous cytotoxic effector systems, radioisotopes, holotoxins, modified toxins, catalytic subunits of toxins, or any molecules or enzymes not normally present in or on the surface of a cell that under defined conditions cause the cell's death. Toxins that may be used according to the methods of the invention include, but are not limited to, radioisotopes known in the art, compounds such as, for example, antibodies (or complement fixing containing portions thereof) that bind an inherent or induced endogenous cytotoxic effector system, thymidine kinase, endonuclease, RNAse, alpha toxin, ricin, abrin, Pseudomonas exotoxin A, diphtheria toxin, saporin, momordin, gelonin, pokeweed antiviral protein, alpha-sarcin and cholera toxin. By “cytotoxic prodrug” is meant a non-toxic compound that is converted by an enzyme, normally present in the cell, into a cytotoxic compound. Cytotoxic prodrugs that may be used according to the methods of the invention include, but are not limited to, glutamyl derivatives of benzoic acid mustard alkylating agent, phosphate derivatives of etoposide or mitomycin C, cytosine arabinoside, daunorubisin, and phenoxyacetamide derivatives of doxorubicin.

### Drug Screening

[0752] Further contemplated is the use of the polypeptides of the present invention, or the polynucleotides encoding these polypeptides, to screen for molecules, which modify the activities of the polypeptides of the present invention. Such a method would include contacting the polypeptide of the present invention with a selected compound(s) suspected of having antagonist or agonist activity, and assaying the activity of these polypeptides following binding.

[0753] This invention is particularly useful for screening therapeutic compounds by using the polypeptides of the present invention, or binding fragments thereof, in any of a variety of drug screening techniques. The polypeptide or fragment employed in such a test may be affixed to a solid support, expressed on a cell surface, free in solution, or located intracellularly. One method of drug screening utilizes eukaryotic or prokaryotic host cells which are stably transformed with recombinant nucleic acids expressing the polypeptide or fragment. Drugs are screened against such transformed cells in competitive binding assays. One may measure, for example, the formulation of complexes between the agent being tested and a polypeptide of the present invention.

[0754] Thus, the present invention provides methods of screening for drugs or any other agents, which affect activities mediated by the polypeptides of the present invention. These methods comprise contacting such an agent with a polypeptide of the present-invention or a fragment thereof and assaying for the presence of a complex between the agent and the polypeptide or a fragment thereof, by methods well known in the art. In such a competitive binding assay, the agents to screen are typically labeled. Following incubation, free agent is separated from that present in bound form, and the amount of free or uncomplexed label is a measure of the ability of a particular agent to bind to the polypeptides of the present invention.

[0755] Another technique for drug screening provides high throughput screening for compounds having suitable binding affinity to the polypeptides of the present invention, and is described in great detail in European Patent Application 84/03564, published on Sep. 13, 1984, which is incorporated herein by reference herein. Briefly stated, large numbers of different small peptide test compounds are synthesized on a solid substrate, such as plastic pins or some other surface. The peptide test compounds are reacted with polypeptides of the present invention and washed. Bound polypeptides are then detected by methods well known in the art. Purified polypeptides are coated directly onto plates for use in the aforementioned drug screening techniques. In addition, non-neutralizing antibodies may be used to capture the peptide and immobilize it on the solid support.

[0756] This invention also contemplates the use of competitive drug screening assays in which neutralizing antibodies capable of binding polypeptides of the present invention specifically compete with a test compound for binding to the polypeptides or fragments thereof. In this manner, the antibodies are used to detect the presence of any peptide which shares one or more antigenic epitopes with a polypeptide of the invention.

### Antisense And Ribozyme (Antagonists)

[0757] In specific embodiments, antagonists according to the present invention are nucleic acids corresponding to the sequences contained in SEQ ID NO:X, or the complementary strand thereof, and/or to cDNA sequences contained in cDNA Clone ID NO:Z identified for example, in Table 1A. In one embodiment, antisense sequence is generated internally, by the organism, in another embodiment, the antisense sequence is separately administered (see, for example, O'Connor, J., Neurochem. 56:560 (1991). Oligodeoxynucleotides as Antisense Inhibitors of Gene Expression, CRC Press, Boca Raton, Fla. (1988). Antisense technology can be used to control gene expression through antisense DNA or RNA, or through triple-helix formation. Antisense techniques are discussed for example, in Okano, J., Neurochem. 56:560 (1991); Oligodeoxynucleotides as Antisense Inhibitors of Gene Expression, CRC Press, Boca Raton, Fla. (1988). Triple helix formation is discussed in, for instance, Lee et al., Nucleic Acids Research 6:3073 (1979); Cooney et al., Science 241:456 (1988); and Dervan et al., Science 251:1300 (1991). The methods are based on binding of a polynucleotide to a complementary DNA or RNA.

[0758] For example, the use of c-myc and c-myb antisense RNA constructs to inhibit the growth of the non-lymphocytic leukemia cell line HL-60 and other cell lines was previously described. (Wickstrom et al. (1988); Anfossi et al. (1989)). These experiments were performed in vitro by incubating cells with the oligoribonucleotide. A similar procedure for in vivo use is described in WO 91/15580. Briefly, a pair of oligonucleotides for a given antisense RNA is produced as follows: A sequence complimentary to the first 15 bases of the open reading frame is flanked by an EcoR1 site on the 5′ end and a HindIII site on the 3′ end. Next, the pair of oligonucleotides is heated at 90° C. for one minute and then annealed in 2×ligation buffer (20 mM TRIS HCl pH 7.5, 10 mM MgCl2, 10 MM dithiothreitol (DTT) and 0.2 mM ATP) and then ligated to the EcoR1/Hind III site of the retroviral vector PMV7 (WO 91/15580).

[0759] For example, the 5′ coding portion of a polynucleotide that encodes the polypeptide of the present invention may be used to design an antisense RNA oligonucleotide of from about 10 to 40 base pairs in length. A DNA oligonucleotide is designed to be complementary to a region of the gene involved in transcription thereby preventing transcription and the production of the receptor. The antisense RNA oligonucleotide hybridizes to the mRNA in vivo and blocks translation of the mRNA molecule into receptor polypeptide.

[0760] In one embodiment, the antisense nucleic acid of the invention is produced intracellularly by transcription from an exogenous sequence. For example, a vector or a portion thereof, is transcribed, producing an antisense nucleic acid (RNA) of the invention. Such a vector would contain a sequence encoding the antisense nucleic acid. Such a vector can remain episomal or become chromosomally integrated, as long as it can be transcribed to produce the desired antisense RNA. Such vectors can be constructed by recombinant DNA technology methods standard in the art. Vectors can be plasmid, viral, or others known in the art, used for replication and expression in vertebrate cells. Expression of the sequence encoding the polypeptide of the present invention or fragments thereof, can be by any promoter known in the art to act in vertebrate, preferably human cells. Such promoters can be inducible or constitutive. Such promoters include, but are not limited to, the SV40 early promoter region (Bernoist and Chambon, Nature 29:304-310 (1981), the promoter contained in the 3′ long terminal repeat of Rous sarcoma virus (Yamamoto et al., Cell 22:787-797 (1980), the herpes thymidine promoter (Wagner et al., Proc. Natl. Acad. Sci. U.S.A. 78:1441-1445 (1981), the regulatory sequences of the metallothionein gene (Brinster, et al., Nature 296:39-42 (1982)), etc.

[0761] The antisense nucleic acids of the invention comprise a sequence complementary to at least a portion of an RNA transcript of a gene of the present invention. However, absolute complementarity, although preferred, is not required. A sequence “complementary to at least a portion of an RNA,” referred to herein, means a sequence having sufficient complementarity to be able to hybridize with the RNA, forming a stable duplex; in the case of double stranded antisense nucleic acids, a single strand of the duplex DNA may thus be tested, or triplex formation may be assayed. The ability to hybridize will depend on both the degree of complementarity and the length of the antisense nucleic acid. Generally, the larger the hybridizing nucleic acid, the more base mismatches with a RNA it may contain and still form a stable duplex (or triplex as the case may be). One skilled in the art can ascertain a tolerable degree of mismatch by use of standard procedures to determine the melting point of the hybridized complex.

[0762] Oligonucleotides that are complementary to the 5′ end of the message, e.g., the 5′ untranslated sequence up to and including the AUG initiation codon, should work most efficiently at inhibiting translation. However, sequences complementary to the 3′ untranslated sequences of mRNAs have been shown to be effective at inhibiting translation of mRNAs as well. See generally, Wagner, R., 1994, Nature 372:333-335. Thus, oligonucleotides complementary to either the 5′- or 3′- non- translated, non-coding regions of polynucleotide sequences described herein could be used in an antisense approach to inhibit translation of endogenous mRNA. Oligonucleotides complementary to the 5′ untranslated region of the mRNA should include the complement of the AUG start codon. Antisense oligonucleotides complementary to mRNA coding regions are less efficient inhibitors of translation but could be used in accordance with the invention. Whether designed to hybridize to the 5′-, 3′- or coding region of mRNA of the present invention, antisense nucleic acids should be at least six nucleotides in length, and are preferably oligonucleotides ranging from 6 to about 50 nucleotides in length. In specific aspects the oligonucleotide is at least 10 nucleotides, at least 17 nucleotides, at least 25 nucleotides or at least 50 nucleotides.

[0763] The polynucleotides of the invention can be DNA or RNA or chimeric mixtures or derivatives or modified versions thereof, single-stranded or double-stranded. The oligonucleotide can be modified at the base moiety, sugar moiety, or phosphate backbone, for example, to improve stability of the molecule, hybridization, etc. The oligonucleotide may include other appended groups such as peptides (e.g., for targeting host cell receptors in vivo), or agents facilitating transport across the cell membrane (see, e.g., Letsinger et al., 1989, Proc. Natl. Acad. Sci. U.S.A. 86:6553-6556; Lemaitre et al., 1987, Proc. Natl. Acad. Sci. 84:648-652; PCT Publication No. WO88/09810, published Dec. 15, 1988) or the blood-brain barrier (see, e.g., PCT Publication No. WO89/10134, published Apr. 25, 1988), hybridization-triggered cleavage agents. (See, e.g., Krol et al., 1988, BioTechniques 6:958-976) or intercalating agents. (See, e.g., Zon, 1988, Pharm. Res. 5:539-549). To this end, the oligonucleotide may be conjugated to another molecule, e.g., a peptide, hybridization triggered cross-linking agent, transport agent, hybridization-triggered cleavage agent, etc.

[0764] The antisense oligonucleotide may comprise at least one modified base moiety which is selected from the group including, but not limited to, 5-fluorouracil, 5-bromouracil, 5-chlorouracil, 5-iodouracil, hypoxanthine, xantine, 4-acetylcytosine, 5-(carboxyhydroxylmethyl) uracil, 5-carboxymethylaminomethyl-2-thiouridine, 5-carboxymethylaminomethyluracil, dihydrouracil, beta-D-galactosylqueosine, inosine, N6-isopentenyladenine, 1-methylguanine, 1-methylinosine, 2,2-dimethylguanine, 2-methyladenine, 2-methylguanine, 3-methylcytosine, 5-methylcytosine, N6-adenine, 7-methylguanine, 5-methylaminomethyluracil, 5-methoxyaminomethyl-2-thiouracil, beta-D-mannosylqueosine, 5′-methoxycarboxymethyluracil, 5-methoxyuracil, 2-methylthio-N6-isopentenyladenine, uracil-5-oxyacetic acid (v), wybutoxosine, pseudouracil, queosine, 2-thiocytosine, 5-methyl-2-thiouracil, 2-thiouracil, 4-thiouracil, 5-methyluracil, uracil-5-oxyacetic acid methylester, uracil-5-oxyacetic acid (v), 5-methyl-2-thiouracil, 3-(3-amino-3-N-2-carboxypropyl) uracil, (acp3)w, and 2,6-diaminopurine.

[0765] The antisense oligonucleotide may also comprise at least one modified sugar moiety selected from the group including, but not limited to, arabinose, 2-fluoroarabinose, xylulose, and hexose.

[0766] In yet another embodiment, the antisense oligonucleotide comprises at least one modified phosphate backbone selected from the group including, but not limited to, a phosphorothioate, a phosphorodithioate, a phosphoramidothioate, a phosphoramidate, a phosphordiamidate, a methylphosphonate, an alkyl phosphotriester, and a formacetal or analog thereof.

[0767] In yet another embodiment, the antisense oligonucleotide is an a-anomeric oligonucleotide. An a-anomeric oligonucleotide forms specific double-stranded hybrids with complementary RNA in which, contrary to the usual b-units, the strands run parallel to each other (Gautier et al., 1987, Nucl. Acids Res. 15:6625-6641). The oligonucleotide is a 2′-0-methylribonucleotide (Inoue et al., 1987, Nucl. Acids Res. 15:6131-6148), or a chimeric RNA-DNA analogue (Inoue et al., 1987, FEBS Lett. 215:327-330).

[0768] Polynucleotides of the invention may be synthesized by standard methods known in the art, e.g. by use of an automated DNA synthesizer (such as are commercially available from Biosearch, Applied Biosystems, etc.). As examples, phosphorothioate oligonucleotides may be synthesized by the method of Stein et al. (1988, Nucl. Acids Res. 16:3209), methylphosphonate oligonucleotides can be prepared by use of controlled pore glass polymer supports (Sarin et al., 1988, Proc. Natl. Acad. Sci. U.S.A. 85:7448-7451), etc.

[0769] While antisense nucleotides complementary to the coding region sequence could be used, those complementary to the transcribed untranslated region are most preferred.

[0770] Potential antagonists according to the invention also include catalytic RNA, or a ribozyme (See, e.g., PCT International Publication WO 90/11364, published Oct. 4, 1990; Sarver et al, Science 247:1222-1225 (1990). While ribozymes that cleave mRNA at site specific recognition sequences can be used to destroy mRNAs, the use of hammerhead ribozymes is preferred. Hammerhead ribozymes cleave mRNAs at locations dictated by flanking regions that form complementary base pairs with the target mRNA. The sole requirement is that the target mRNA have the following sequence of two bases: 5′-UG-3′. The construction and production of hammerhead ribozymes is well known in the art and is described more fully in Haseloff and Gerlach, Nature 334:585-591 (1988). There are numerous potential hammerhead ribozyme cleavage sites within the nucleotide sequence of SEQ ID NO:X. Preferably, the ribozyme is engineered so that the cleavage recognition site is located near the 5′ end of the mRNA; i.e., to increase efficiency and minimize the intracellular accumulation of non-functional mRNA transcripts.

[0771] As in the antisense approach, the ribozymes of the invention can be composed of modified oligonucleotides (e.g. for improved stability, targeting, etc.) and should be delivered to cells which express in vivo. DNA constructs encoding the ribozyme may be introduced into the cell in the same manner as described above for the introduction of antisense encoding DNA. A preferred method of delivery involves using a DNA construct “encoding” the ribozyme under the control of a strong constitutive promoter, such as, for example, pot III or pot II promoter, so that transfected cells will produce sufficient quantities of the ribozyme to destroy endogenous messages and inhibit translation. Since ribozymes unlike antisense molecules, are catalytic, a lower intracellular concentration is required for efficiency.

[0772] Antagonist/agonist compounds may be employed to inhibit the cell growth and proliferation effects of the polypeptides of the present invention on neoplastic cells and tissues, i.e. stimulation of angiogenesis of tumors, and, therefore, retard or prevent abnormal cellular growth and proliferation, for example, in tumor formation or growth.

[0773] The antagonist/agonist may also be employed to prevent hyper-vascular diseases, and prevent the proliferation of epithelial lens cells after extracapsular cataract surgery. Prevention of the mitogenic activity of the polypeptides of the present invention may also be desirous in cases such as restenosis after balloon angioplasty.

[0774] The antagonist/agonist may also be employed to prevent the growth of scar tissue during wound healing.

[0775] The antagonist/agonist may also be employed to treat the diseases described herein.

[0776] Thus, the invention provides a method of treating disorders or diseases, including but not limited to the disorders or diseases listed throughout this application, associated with overexpression of a polynucleotide of the present invention by administering to a patient (a) an antisense molecule directed to the polynucleotide of the present invention, and/or (b) a ribozyme directed to the polynucleotide of the present invention.

### Binding Peptides and Other Molecules

[0777] The invention also encompasses screening methods for identifying polypeptides and nonpolypeptides that bind prostate cancer antigen polypeptides, and the prostate cancer antigen binding molecules identified thereby. These binding molecules are useful, for example, as agonists and antagonists of the prostate cancer antigen polypeptides. Such agonists and antagonists can be used, in accordance with the invention, in the therapeutic embodiments described in detail, below.

[0778] This method comprises the steps of: contacting prostate cancer antigen polypeptides or prostate cancer antigen-like polypeptides with a plurality of molecules; and identifying a molecule that binds the prostate cancer antigen polypeptides or prostate cancer antigen-like polypeptides.

[0779] The step of contacting the prostate cancer antigen polypeptides or prostate cancer antigen-like polypeptides with the plurality of molecules may be effected in a number of ways. For example, one may contemplate immobilizing the prostate cancer antigen polypeptides or prostate cancer antigen-like polypeptides on a solid support and bringing a solution of the plurality of molecules in contact with the immobilized prostate cancer antigen polypeptides or prostate cancer antigen-like polypeptides. Such a procedure would be akin to an affinity chromatographic process, with the affinity matrix being comprised of the immobilized prostate cancer antigen polypeptides or prostate cancer antigen-like polypeptides. The molecules having a selective affinity for the prostate cancer antigen polypeptides or prostate cancer antigen-like polypeptides can then be purified by affinity selection. The nature of the solid support, process for attachment of the prostate cancer antigen polypeptides or prostate cancer antigen-like polypeptides to the solid support, solvent, and conditions of the affinity isolation or selection are largely conventional and well known to those of ordinary skill in the art.

[0780] Alternatively, one may also separate a plurality of polypeptides into substantially separate fractions comprising a subset of or individual polypeptides. For instance, one can separate the plurality of polypeptides by gel electrophoresis, column chromatography, or like method known to those of ordinary skill for the separation of polypeptides. The individual polypeptides can also be produced by a transformed host cell in such a way as to be expressed on or about its outer surface (e.g., a recombinant phage). Individual isolates can then be “probed” by the prostate cancer antigen polypeptides or prostate cancer antigen-like polypeptides, optionally in the presence of an inducer should one be required for expression, to determine if any selective affinity interaction takes place between the prostate cancer antigen polypeptides or prostate cancer antigen-like polypeptides and the individual clone. Prior to contacting the prostate cancer antigen polypeptides or prostate cancer antigen-like polypeptides with each fraction comprising individual polypeptides, the polypeptides could first be transferred to a solid support for additional convenience. Such a solid support may simply be a piece of filter membrane, such as one made of nitrocellulose or nylon. In this manner, positive clones could be identified from a collection of transformed host cells of an expression library, which harbor a DNA construct encoding a polypeptide having a selective affinity for prostate cancer antigen polypeptides or prostate cancer antigen-like polypeptides. Furthermore, the amino acid sequence of the polypeptide having a selective affinity for the prostate cancer antigen polypeptides or prostate cancer antigen-like polypeptides can be determined directly by conventional means or the coding sequence of the DNA encoding the polypeptide can frequently be determined more conveniently. The primary sequence can then be deduced from the corresponding DNA sequence. If the amino acid sequence is to be determined from the polypeptide itself, one may use microsequencing techniques. The sequencing technique may include mass spectroscopy.

[0781] In certain situations, it may be desirable to wash away any unbound prostate cancer antigen polypeptides or prostate cancer antigen-like polypeptides, or alternatively, unbound polypeptides, from a mixture of the prostate cancer antigen polypeptides or prostate cancer antigen-like polypeptides and the plurality of polypeptides prior to attempting to determine or to detect the presence of a selective affinity interaction. Such a wash step may be particularly desirable when the prostate cancer antigen polypeptides or prostate cancer antigen-like polypeptides or the plurality of polypeptides is bound to a solid support.

[0782] The plurality of molecules provided according to this method may be provided by way of diversity libraries, such as random or combinatorial peptide or nonpeptide libraries which can be screened for molecules that specifically bind prostate cancer antigen polypeptides. Many libraries are known in the art that can be used, e.g., chemically synthesized libraries, recombinant (e.g., phage display libraries), and in vitro translation-based libraries. Examples of chemically synthesized libraries are described in Fodor et al., 1991, Science 251:767-773; Houghten et al., 1991, Nature 354:84-86; Lam et al., 1991, Nature 354:82-84; Medynski, 1-994, Bio/Technology 12:709-710;Gallop et al., 1994, J. Medicinal Chemistry 37(9):1233-1251; Ohlmeyer et al., 1993, Proc. Natl. Acad. Sci. USA 90:10922-10926; Erb et al., 1994, Proc. Natl. Acad. Sci. USA 91:11422-11426; Houghten et al., 1992, Biotechniques 13:412; Jayawickreme et al., 1994, Proc. Natl. Acad. Sci. USA 91:1614-1618; Salmon et al., 1993, Proc. Natl. Acad. Sci. USA 90:11708-11712; PCT Publication No. WO 93/20242; and Brenner and Lerner, 1992, Proc. Natl. Acad. Sci. USA 89:5381-5383.

[0783] Examples of phage display libraries are described in Scott and Smith, 1990, Science 249:386-390; Devlin et al., 1990, Science, 249:404-406; Christian, R. B., et al., 1992, J. Mol. Biol. 227:711-718); Lenstra, 1992, J. Immunol. Meth. 152:149-157; Kay et al., 1993, Gene 128:59-65; and PCT Publication No. WO 94/18318 dated Aug. 18, 1994.

[0784] In vitro translation-based libraries include but are not limited to those described in PCT Publication No. WO 91/05058 dated Apr. 18, 1991; and Mattheakis et al., 1994, Proc. Natl. Acad. Sci. USA 91:9022-9026.

[0785] By way of examples of nonpeptide libraries, a benzodiazepine library (see e.g., Bunin et al., 1994, Proc. Natl. Acad. Sci. USA 91:4708-4712) can be adapted for use. Peptoid libraries (Simon et al., 1992, Proc. Natl. Acad. Sci. USA 89:9367-9371) can also be used. Another example of a library that can be used, in which the amide functionalities in peptides have been permethylated to generate a chemically transformed combinatorial library, is described by Ostresh et al. (1994, Proc. Natl. Acad. Sci. USA 91:11138-11142).

[0786] The variety of non-peptide libraries that are useful in the present invention is great. For example, Ecker and Crooke, 1995, Bio/Technology 13:351-360 list benzodiazepines, hydantoins, piperazinediones, biphenyls, sugar analogs, beta-mercaptoketones, arylacetic acids, acylpiperidines, benzopyrans, cubanes, xanthines, aminimides, and oxazolones as among the chemical species that form the basis of various libraries.

[0787] Non-peptide libraries can-be classified broadly into two types: decorated monomers and oligomers. Decorated monomer libraries employ a relatively simple scaffold structure upon which a variety functional groups is added. Often the scaffold will be a molecule with a known useful pharmacological activity. For example, the scaffold might be the benzodiazepine structure.

[0788] Non-peptide oligomer libraries utilize a large number of monomers that are assembled together in ways that create new shapes that depend on the order of the monomers. Among the monomer units that have been used are carbamates, pyrrolinones, and morpholinos. Peptoids, peptide-like oligomers in which the side chain is attached to the alpha amino group rather than the alpha carbon, form the basis of another version of non-peptide oligomer libraries. The first non-peptide oligomer libraries utilized a single type of monomer and thus contained a repeating backbone. Recent libraries have utilized more than one monomer, giving the libraries added flexibility.

[0789] Screening the libraries can be accomplished by any of a variety of commonly known methods. See, e.g., the following references, which disclose screening of peptide libraries: Parmley′ and Smith, 1989, Adv. Exp. Med. Biol. 251:215-218; Scott and Smith, 1990, Science 249:386-390; Fowlkes et al., 1992; BioTechniques 13:422-427; Oldenburg et al., 1992, Proc. Natl. Acad. Sci. USA 89:5393-5397; Yu et al., 1994, Cell 76:933-945; Staudt et al., 1988, Science 241:577-580; Bock et al., 1992, Nature 355:564-566; Tuerk et al., 1992, Proc. Natl. Acad. Sci. USA 89:6988-6992; Ellington et al., 1992, Nature 355:850-852; U.S. Pat. No. 5,096,815, U.S. Pat. No. 5,223,409, and U.S. Pat. No. 5,198,346, all to Ladner et al.; Rebar and Pabo, 1993, Science 263:671-673; and CT Publication No. WO 94/18318.

[0790] In a specific embodiment, screening to identify a molecule that binds prostate cancer antigen polypeptides can be carried out by contacting the library members with a prostate cancer antigen polypeptides or prostate cancer antigen-like polypeptides immobilized on a solid phase and harvesting those library members that bind to the prostate cancer antigen polypeptides or prostate cancer antigen-like polypeptides. Examples of such screening methods, termed “panning” techniques are described byway of example in Parmley and Smith, 1988, Gene 73:305-318; Fowlkes et al., 1992, BioTechniques 13:422-427; International Publication No. WO 94/18318; and in references cited herein.

[0791] In another embodiment, the two-hybrid system for selecting interacting proteins in yeast (Fields and Song, 1989, Nature 340:245-246; Chien et al., 1991, Proc. Natl. Acad. Sci. USA 88:9578-9582) can be used to identify molecules that specifically bind to prostate cancer antigen polypeptides or prostate cancer antigen-like polypeptides.

[0792] Where the prostate cancer antigen binding molecule is a polypeptide, the polypeptide can be conveniently selected from any peptide library, including random peptide libraries, combinatorial peptide libraries, or biased peptide libraries. The term “biased” is used herein to mean that the method of generating the library is manipulated so as to restrict one or more parameters that govern the diversity of the resulting collection of molecules, in this case peptides.

[0793] Thus, a truly random peptide library would generate a collection of peptides in which the probability of finding a particular amino acid at a given position of the peptide is the same for all 20 amino acids. A bias can be introduced into the library, however, by specifying, for example, that a lysine occurs every fifth amino acid or that positions 4, 8, and 9 of a decapeptide library be fixed to include only arginine. Clearly, many types of biases can be contemplated, and the present invention is not restricted to any particular bias. Furthermore, the present invention contemplates specific types of peptide libraries, such as phage displayed peptide libraries and those that utilize a DNA construct comprising a lambda phage vector with a DNA insert.

[0794] As mentioned above, in the case of a prostate cancer antigen binding molecule that is a polypeptide, the polypeptide may have about 6 to less than about 60 amino acid residues, preferably about 6 to about 10 amino acid residues, and most preferably, about 6 to about 22 amino acids. In another embodiment, a prostate cancer antigen binding polypeptide has in the range of 15-100 amino acids, or 20-50 amino acids.

[0795] The selected prostate cancer antigen binding polypeptide can be obtained by chemical synthesis or recombinant expression.

### Other Activities

[0796] A polypeptide, polynucleotide, agonist, or antagonist of the present invention, as a result of the ability to stimulate vascular endothelial cell growth, may be employed in treatment for stimulating re-vascularization of ischemic tissues due to various disease conditions such as thrombosis, arteriosclerosis, and other cardiovascular conditions. The polypeptide, polynucleotide, agonist, or antagonist of the present invention may also be employed to stimulate angiogenesis and limb regeneration, as discussed above.

[0797] A polypeptide, polynucleotide, agonist, or antagonist of the present invention may also be employed for treating wounds due to injuries, burns, post-operative tissue repair, and ulcers since they are mitogenic to various cells of different origins, such as fibroblast cells and skeletal muscle cells, and therefore, facilitate the repair or replacement of damaged or diseased tissue.

[0798] A polypeptide, polynucleotide, agonist, or antagonist of the present invention may also be employed to stimulate neuronal growth and to treat and prevent neuronal damage which occurs in certain neuronal disorders or neuro-degenerative conditions such as Alzheimer's disease, Parkinson's disease, and AIDS-related complex. A polypeptide, polynucleotide, agonist, or antagonist of the present invention may have the ability to stimulate chondrocyte growth; therefore, they may be employed to enhance bone and periodontal regeneration and aid in tissue transplants or bone grafts.

[0799] A polypeptide, polynucleotide, agonist, or antagonist of the present invention may be also employed to prevent skin aging due to sunburn by stimulating keratinocyte growth.

[0800] A polypeptide, polynucleotide, agonist, or antagonist of the present invention may also be employed for preventing hair loss, since FGF family members activate hair-forming cells and promotes melanocyte growth. Along the same lines, a polypeptide, polynucleotide, agonist, or antagonist of the present invention may be employed to stimulate growth and differentiation of hematopoietic cells and bone marrow cells when used in combination with other cytokines.

[0801] A polypeptide, polynucleotide, agonist, or antagonist of the present invention may also be employed to maintain organs before transplantation or for supporting cell culture of primary tissues. A polypeptide, polynucleotide, agonist, or antagonist of the present invention may also be employed for inducing tissue of mesodermal origin to differentiate in early embryos.

[0802] A polypeptide, polynucleotide, agonist, or antagonist of the present invention may also increase or decrease the differentiation or proliferation of embryonic stem cells, besides, as discussed above, hematopoietic lineage.

[0803] A polypeptide, polynucleotide, agonist, or antagonist of the present invention may also be used to modulate mammalian characteristics, such as body height, weight, hair color, eye color, skin, percentage of adipose tissue, pigmentation, size, and shape (e.g., cosmetic surgery). Similarly, a polypeptide, polynucleotide, agonist, or antagonist of the present invention may be used to modulate mammalian metabolism affecting catabolism, anabolism, processing, utilization, and storage of energy.

[0804] A polypeptide, polynucleotide, agonist, or antagonist of the present invention may be used to change a mammal's mental state or physical state by influencing biorhythms, caricadic rhythms, depression (including depressive disorders), tendency for violence, tolerance for pain, reproductive capabilities (preferably by Activin or Inhibin-like activity), hormonal or endocrine levels, appetite, libido, memory, stress, or other cognitive qualities.

[0805] A polypeptide, polynucleotide, agonist, or antagonist of the present invention may also be used as a food additive or preservative, such as to increase or decrease storage capabilities, fat content, lipid, protein, carbohydrate, vitamins, minerals, cofactors or other nutritional components.

[0806] The above-recited applications have uses in a wide variety of hosts. Such hosts include, but are not limited to, human, murine, rabbit, goat, guinea pig, camel, horse, mouse, rat, hamster, pig, micro-pig, chicken, goat, cow, sheep, dog, cat, non-human primate, and human. In specific embodiments, the host is a mouse, rabbit, goat, guinea pig, chicken, rat, hamster, pig, sheep, dog or cat. In preferred embodiments, the host is a mammal. In most preferred embodiments, the host is a human.

### Other Preferred Embodiments

[0807] Other preferred embodiments of the claimed invention include an isolated nucleic acid molecule comprising a nucleotide sequence which is at least 95% identical to a sequence of at least about 50 contiguous nucleotides in the nucleotide sequence of SEQ ID NO:X or the complementary strand thereto, the nucleotide sequence as defined in column 4 of Table 1A or columns 8 and 9 of Table 2 or the complementary strand thereto, and/or cDNA contained in Clone ID NO:Z.

[0808] Also preferred is a nucleic acid molecule wherein said sequence of contiguous nucleotides is included in the nucleotide sequence of the portion of SEQ ID NO:X as defined in column 4, “ORF (From-To)”, in Table 1A.

[0809] Also preferred is a nucleic acid molecule wherein said sequence of contiguous nucleotides is included in the nucleotide sequence of the portion of SEQ ID NO:X as defined in columns 8 and 9, “NT From” and “NT To” respectively, in Table 2.

[0810] Also preferred is an isolated nucleic acid molecule comprising a nucleotide sequence which is at least 95% identical to a sequence of at least about 150 contiguous nucleotides in the nucleotide sequence of SEQ ID NO:X or the complementary strand thereto, the nucleotide sequence as defined in column 4 of Table 1A or columns 8 and 9 of Table 2 or the complementary strand thereto, and/or cDNA contained in Clone ID NO:Z.

[0811] Further preferred is an isolated nucleic acid molecule comprising a nucleotide sequence which is at least 95% identical to a sequence of at least about 500 contiguous nucleotides in the nucleotide sequence of SEQ ID NO:X or the complementary strand thereto, the nucleotide sequence as defined in column 4 of Table 1A or columns 8 and 9 of Table 2 or the complementary strand thereto, and/or cDNA contained in Clone ID NO:Z.

[0812] A further preferred embodiment is a nucleic acid molecule comprising a nucleotide sequence which is at least 95% identical to the nucleotide sequence of the portion of SEQ ID NO:X defined in column 4, “ORF (From-To)”, in Table 1A.

[0813] A further preferred embodiment is a nucleic acid molecule comprising a nucleotide sequence which is at least 95% identical to the nucleotide sequence of the portion of SEQ ID NO:X defined in columns 8 and 9, “NT From” and “NT To”, respectively, in Table 2.

[0814] A further preferred embodiment is an isolated nucleic acid molecule comprising a nucleotide sequence which is at least 95% identical to the complete nucleotide sequence of SEQ ID NO:X or the complementary strand thereto, the nucleotide sequence as defined in column 4 of Table 1A or columns 8 and 9 of Table 2 or the complementary strand thereto, and/or cDNA contained in Clone ID NO:Z.

[0815] Also preferred is an isolated nucleic acid molecule which hybridizes under stringent hybridization conditions to a nucleic acid molecule comprising a nucleotide sequence of SEQ ID NO:X or the complementary strand thereto, the nucleotide sequence as defined in column 4 of Table 1A or columns 8 and 9 of Table 2 or the complementary strand thereto, and/or cDNA contained in Clone ID NO:Z, wherein said nucleic acid molecule which hybridizes does not hybridize under stringent hybridization conditions to a nucleic acid molecule having a nucleotide sequence consisting of only A residues or of only T residues.

[0816] Also preferred is a composition of matter comprising a DNA molecule which comprises the cDNA contained in Clone ID NO:Z.

[0817] Also preferred is an isolated nucleic acid molecule comprising a nucleotide sequence which is at least 95% identical to a sequence of at least 50 contiguous nucleotides of the cDNA sequence contained in Clone ID NO:Z.

[0818] Also preferred is an isolated nucleic acid molecule, wherein said sequence of at least 50 contiguous nucleotides is included in the nucleotide sequence of an open reading frame sequence encoded by cDNA contained in Clone ID NO:Z.

[0819] Also preferred is an isolated nucleic acid molecule comprising a nucleotide sequence which is at least 95% identical to sequence of at least 150 contiguous nucleotides in the nucleotide sequence encoded by cDNA contained in Clone ID NO:Z.

[0820] A further preferred embodiment is an isolated nucleic acid molecule comprising a nucleotide sequence which is at least 95% identical to sequence of at least 500 contiguous nucleotides in the nucleotide sequence encoded by cDNA contained in Clone ID NO:Z.

[0821] A further preferred embodiment is an isolated nucleic acid molecule comprising a nucleotide sequence which is at least 95% identical to the complete nucleotide sequence encoded by cDNA contained in Clone ID NO:Z.

[0822] A further preferred embodiment is a method for detecting in a biological sample a nucleic acid molecule comprising a nucleotide sequence which is at least 95% identical to a sequence of at least 50 contiguous nucleotides in a sequence selected from the group consisting of: a nucleotide sequence of SEQ ID NO:X or the complementary strand thereto; the nucleotide sequence as defined in column 4 of Table 1A or columns 8 and 9 of Table 2 or the complementary strand thereto; and a nucleotide sequence encoded by cDNA contained in Clone ID NO:Z; which method comprises a step of comparing a nucleotide sequence of at least one nucleic acid molecule in said sample with a sequence selected from said group and determining whether the sequence of said nucleic acid molecule in said sample is at least 95% identical to said selected sequence.

[0823] Also preferred is the above method wherein said step of comparing sequences comprises determining the extent of nucleic acid hybridization between nucleic acid molecules in said sample and a nucleic acid molecule comprising said sequence selected from said group. Similarly, also preferred is the above method wherein said step of comparing sequences is performed by comparing the nucleotide sequence determined from a nucleic acid molecule in said sample with said sequence selected from said group. The nucleic acid-molecules can comprise DNA molecules or RNA molecules.

[0824] A further preferred embodiment is a method for identifying the species, tissue or cell type of a biological sample which method comprises a step of detecting nucleic acid molecules in said sample, if any, comprising a nucleotide sequence that is at least 95% identical to a sequence of at least 50 contiguous nucleotides in a sequence selected from the group consisting of: a nucleotide sequence of SEQ ID NO:X or the complementary strand thereto; the nucleotide sequence as defined in column 4 of Table 1A or columns 8 and 9 of Table 2 or the complementary strand thereto; and a nucleotide sequence of the cDNA contained in Clone ID NO:Z.

[0825] The method for identifying the species, tissue or cell type of a biological sample can comprise a step of detecting nucleic acid molecules comprising a nucleotide sequence in a panel of at least two nucleotide sequences, wherein at least one sequence in said panel is at least 95% identical to a sequence of at least 50 contiguous nucleotides in a sequence selected from said group.

[0826] Also preferred is a method for diagnosing in a subject a pathological condition associated with abnormal structure or expression of a nucleotide sequence of SEQ ID NO:X or the complementary strand thereto; the nucleotide sequence as defined in column 4 of Table 1A or columns 8 and 9 of Table 2 or the complementary strand thereto; or the cDNA contained in Clone ID NO:Z which encodes a protein, wherein the method comprises a step of detecting in a biological sample obtained from said subject nucleic acid molecules, if any, comprising a nucleotide sequence that is at least 95% identical to a sequence of at least 50 contiguous nucleotides in a sequence selected from the group consisting of. a nucleotide sequence of SEQ ID NO:X or the complementary strand thereto; the nucleotide sequence as defined in column 4 of Table 1A or columns 8 and 9 of Table 2 or the complementary strand thereto; and a nucleotide sequence of cDNA contained in Clone ID NO:Z.

[0827] The method for diagnosing a pathological condition can comprise a step of detecting nucleic acid molecules comprising a nucleotide sequence in a panel of at least two nucleotide sequences, wherein at least one sequence in said panel is at least 95% identical to a sequence of at least 50 contiguous nucleotides in a sequence selected from said group.

[0828] Also preferred is a composition of matter comprising isolated nucleic acid molecules wherein the nucleotide sequences of said nucleic acid molecules comprise a panel of at least two nucleotide sequences, wherein at least one sequence in said panel is at least 95% identical to a sequence of at least 50 contiguous nucleotides in a sequence selected from the group consisting of: a nucleotide sequence of SEQ ID NO:X or the complementary strand thereto; the nucleotide sequence as defined in column 4 of Table 1A or columns 8 and 9 of Table 2 or the complementary strand thereto; and a nucleotide sequence encoded by cDNA contained in Clone ID NO:Z. The nucleic acid molecules can comprise DNA molecules or RNA molecules.

[0829] Also preferred is a composition of matter comprising isolated nucleic acid molecules wherein the nucleotide sequences of said nucleic acid molecules comprise a DNA microarray or “chip” of at least 1, 2, 3, 4, 5, 6, 7, 8, 9, 10, 15, 20, 25, 30, 40, 50, 100, 150, 200, 250, 300, 500, 1000, 2000, 3000, or 4000 nucleotide sequences, wherein at least one sequence in said DNA microarray or “chip” is at least 95% identical to a sequence of at least 50 contiguous nucleotides in a sequence selected from the group consisting of: a nucleotide sequence of SEQ ID NO:X wherein X is any integer as defined in Table 1A; and a nucleotide sequence encoded by a human cDNA clone identified by a cDNA “Clone ID” in Table 1A.

[0830] Also preferred is an isolated polypeptide comprising an amino acid sequence at least 90% identical to a sequence of at least about 10 contiguous amino acids in the polypeptide sequence of SEQ ID NO:Y; a polypeptide encoded by SEQ ID NO:X or the complementary strand thereto; the polypeptide encoded by the nucleotide sequence as defined in columns 8 and 9 of Table 2; and/or a polypeptide encoded by cDNA contained in Clone ID NO:Z.

[0831] Also preferred is an isolated polypeptide comprising an amino acid sequence at least 95% identical to a sequence of at least about 30 contiguous amino acids in the amino acid sequence of SEQ ID NO:Y; a polypeptide encoded by SEQ ID NO:X or the complementary strand thereto; the polypeptide encoded by the nucleotide sequence as defined in columns 8 and 9 of Table 2; and/or a polypeptide encoded by cDNA contained in Clone ID NO:Z.

[0832] Further preferred is an isolated polypeptide comprising an amino acid sequence at least 95% identical to a sequence of at least about 100 contiguous amino acids in the amino acid sequence of SEQ ID NO:Y; a polypeptide encoded by SEQ ID NO:X or the complementary strand thereto; the polypeptide encoded by the nucleotide sequence as defined in columns 8 and 9 of Table 2; and/or a polypeptide encoded by cDNA contained in Clone ID NO:Z.

[0833] Further preferred is an isolated polypeptide comprising an amino acid sequence at least 95% identical to the complete amino acid sequence of SEQ ID NO:Y; a polypeptide encoded by SEQ ID NO:X or the complementary strand thereto; the polypeptide encoded by the nucleotide sequence as defined in columns 8 and 9 of Table 2; and/or a polypeptide encoded by cDNA contained in Clone ID NO:Z.

[0834] Further preferred is an isolated polypeptide comprising an amino acid sequence at least 90% identical to a sequence of at least about 10 contiguous amino acids in the complete amino acid sequence of a polypeptide encoded by contained in Clone ID NO:Z

[0835] Also preferred is a polypeptide wherein said sequence of contiguous amino acids is included in the amino acid sequence of a portion of said polypeptide encoded by cDNA contained in Clone ID NO:Z; a polypeptide encoded by SEQ ID NO:X or the complementary strand thereto; the polypeptide encoded by the nucleotide sequence as defined in columns 8 and 9 of Table 2; and/or the polypeptide sequence of SEQ ID NO:Y.

[0836] Also preferred is an isolated polypeptide comprising an amino acid sequence at least 95% identical to a sequence of at least about 30 contiguous amino acids in the amino acid sequence of a polypeptide encoded by the cDNA contained in Clone ID NO:Z.

[0837] Also preferred is an isolated polypeptide comprising an amino acid sequence at least 95% identical to a sequence of at least about 100 contiguous amino acids in the amino acid sequence of a polypeptide encoded by cDNA contained in Clone ID NO:Z.

[0838] Also preferred is an isolated polypeptide comprising an amino acid sequence at least 95% identical to the amino acid sequence of a polypeptide encoded by the cDNA contained in Clone ID NO:Z.

[0839] Further preferred is an isolated antibody which binds specifically to a polypeptide comprising an amino acid sequence that is at least 90% identical to a sequence of at least 10 contiguous amino acids in a sequence selected from the group consisting of: a polypeptide sequence of SEQ ID NO:Y; a polypeptide encoded by SEQ ID NO:X or the complementary strand thereto; the polypeptide encoded by the nucleotide sequence as defined in columns 8 and 9 of Table 2; and a polypeptide encoded by the cDNA contained in Clone ID NO:Z.

[0840] Further preferred is a method for detecting in a biological sample a polypeptide comprising an amino acid sequence which is at least 90% identical to a sequence of at least 10 contiguous amino acids in a sequence selected from the group consisting of: a polypeptide sequence of SEQ ID NO:Y; a polypeptide encoded by SEQ ID NO:X or the complementary strand thereto; the polypeptide encoded by the nucleotide sequence as defined in columns 8 and 9 of Table 2; and a polypeptide encoded by the cDNA contained in Clone ID NO:Z; which method comprises a step of comparing an amino acid sequence of at least one polypeptide molecule in said sample with a sequence selected from said group and determining whether the sequence of said polypeptide molecule in said sample is at least 90% identical to said sequence of at least 10 contiguous amino acids.

[0841] Also preferred is the above method wherein said step of comparing an amino acid sequence of at least one polypeptide molecule in said sample with a sequence selected from said group comprises determining the extent of specific binding of polypeptides in said sample to an antibody which binds specifically to a polypeptide comprising an amino acid sequence that is at least 90% identical to a sequence of at least 10 contiguous amino acids in a sequence selected from the group consisting of: a polypeptide sequence of SEQ ID NO:Y; a polypeptide encoded by SEQ ID NO:X or the complementary strand thereto; the polypeptide encoded by the nucleotide sequence as defined in columns 8 and 9 of Table 2; and a polypeptide encoded by the cDNA contained in Clone ID NO:Z.

[0842] Also preferred is the above method wherein said step of comparing sequences is performed by comparing the amino acid sequence determined from a polypeptide molecule in said sample with said sequence selected from said group.

[0843] Also preferred is a method for identifying the species, tissue or cell type of a biological sample which method comprises a step of detecting polypeptide molecules in said sample, if any, comprising an amino acid sequence that is at least 90% identical to a sequence of at least 10 contiguous amino acids in a sequence selected from the group consisting of: polypeptide sequence of SEQ ID NO:Y; a polypeptide encoded by SEQ ID NO:X or the complementary strand thereto; the polypeptide encoded by the nucleotide sequence as defined in columns 8 and 9 of Table 2; and a polypeptide encoded by the cDNA contained in Clone ID NO:Z.

[0844] Also preferred is the above method for identifying the species, tissue or cell type of a biological sample, which method comprises a step of detecting polypeptide molecules comprising an amino acid sequence in a panel of at least two amino acid sequences, wherein at least one sequence in said panel is at least 90% identical to a sequence of at least 10 contiguous amino acids in a sequence selected from the above group.

[0845] Also preferred is a method for diagnosing in a subject a pathological condition associated with abnormal structure or expression of a nucleic acid sequence identified in Table 1A or Table 2 encoding a polypeptide, which method comprises a step of detecting in a biological sample obtained from said subject polypeptide molecules comprising an amino acid sequence in a panel of at least two amino acid sequences, wherein at least one sequence in said panel is at least 90% identical to a sequence of at least 10 contiguous amino acids in a sequence selected from the group consisting of: polypeptide sequence of SEQ ID NO:Y; a polypeptide encoded by SEQ ID NO:X or the complementary strand thereto; the polypeptide encoded by the nucleotide sequence as defined in columns 8 and 9 of Table 2; and a polypeptide encoded by the cDNA contained in Clone ID NO:Z.

[0846] In any of these methods, the step of detecting said polypeptide molecules includes using an antibody.

[0847] Also preferred is an isolated nucleic acid molecule comprising a nucleotide sequence which is at least 95% identical to a nucleotide sequence encoding a polypeptide wherein said polypeptide comprises an amino acid sequence that is at least 90% identical to a sequence of at least 10 contiguous amino acids in a sequence selected from the group consisting of: polypeptide sequence of SEQ ID NO:Y; a polypeptide encoded by SEQ ID NO:X or the complementary strand thereto; the polypeptide encoded by the nucleotide sequence as defined in columns 8 and 9 of Table 2; and a polypeptide encoded by the EDNA contained in Clone ID NO:Z.

[0848] Also preferred is an isolated nucleic acid molecule, wherein said nucleotide sequence encoding a polypeptide has been optimized for expression of said polypeptide in a prokaryotic host.

[0849] Also preferred is a polypeptide molecule, wherein said polypeptide comprises an amino acid sequence selected from the group consisting of: polypeptide sequence of SEQ ID NO:Y; a polypeptide encoded by SEQ ID NO:X or the complementary strand thereto; the polypeptide encoded by the nucleotide sequence as defined in columns 8 and 9 of Table 2; and a polypeptide encoded by the cDNA contained in Clone ID NO:Z.

[0850] Further preferred is a method of making a recombinant vector comprising inserting any of the above isolated nucleic acid molecule into a vector. Also preferred is the recombinant vector produced by this method. Also preferred is a method of making a recombinant host cell comprising introducing the vector into a host cell, as well as the recombinant host cell produced by this method.

[0851] Also preferred is a method of making an isolated polypeptide comprising culturing this recombinant host cell under conditions such that said polypeptide is expressed and recovering said polypeptide. Also preferred is this method of making an isolated polypeptide, wherein said recombinant host cell is a eukaryotic cell and said polypeptide is a human protein comprising an amino acid sequence selected from the group consisting of: polypeptide sequence of SEQ ID NO:Y; a polypeptide encoded by SEQ ID NO:X or the complementary strand thereto; the polypeptide encoded by the nucleotide sequence as defined in columns 8 and 9 of Table 2; and a polypeptide encoded by the cDNA contained in Clone ID NO:Z. The isolated polypeptide produced by this method is also preferred.

[0852] Also preferred is a method of treatment of an individual in need of an increased level of a protein activity, which method comprises administering to such an individual a Therapeutic comprising an amount of an isolated polypeptide, polynucleotide, immunogenic fragment or analogue thereof, binding agent, antibody, or antigen binding fragment of the claimed invention effective to increase the level of said protein activity in said individual.

[0853] Also preferred is a method of treatment of an individual in need of a decreased level of a protein activity, which method comprised administering to such an individual a Therapeutic comprising an amount of an isolated polypeptide, polynucleotide, immunogenic fragment or analogue thereof, binding agent, antibody, or antigen binding,fragment of the claimed invention effective to decrease the level of said protein activity in said individual.

[0854] Also preferred is a method of treatment of an individual in need of a specific delivery of toxic compositions to diseased cells (e.g., tumors, leukemias or lymphomas), which method comprises administering to such an individual a Therapeutic comprising an amount of an isolated polypeptide of the invention, including, but not limited to a binding agent, or antibody of the claimed invention that are associated with toxin or cytotoxic prodrugs.

[0855] Having generally described the invention, the same will be more readily understood by reference to the following examples, which are provided by way of illustration and are not intended as limiting.

TABLE 6

| ATCC Deposits | Deposit Date | ATCC Designation Number |
|---|---|---|
| LP01, LP02, LP03, | May 20, 1997 | 209059, 209060, 209061, 209062, |
| LP04, LP05, LP06, | | 209063, 209064, 209065, 209066, |
| LP07, LP08, LP09, | | 209067, 209068, 209069 |
| LP10, LP11, | | |
| LP12 | Jan. 12, 1998 | 209579 |
| LP13 | Jan. 12, 1998 | 209578 |
| LP14 | Jul. 16, 1998 | 203067 |
| LP15 | Jul. 16, 1998 | 203068 |
| LP16 | Feb. 1, 1999 | 203609 |
| LP17 | Feb. 1, 1999 | 203610 |
| LP20 | Nov. 17, 1998 | 203485 |
| LP21 | Jun. 18, 1999 | PTA-252 |
| LP22 | Jun. 18, 1999 | PTA-253 |
| LP23 | Dec. 22, 1999 | PTA-1081 |

### Examples

### Example 1

### Isolation of a Selected cDNA Clone from the Deposited Sample

[0856] Each Clone ID NO:Z is contained in a plasmid. Table 7 identifies the vectors used to construct the cDNA library from which each clone was isolated. In many cases, the vector used to construct the library is a phage vector from which a plasmid has been excised. The following correlates the related plasmid for each phage vector used in constructing the cDNA library. For example, where a particular clone is identified in Table 7 as being isolated in the vector “Lambda Zap,” the corresponding deposited clone is in “pBluescript.”

| Vector Used to Construct Library | Corresponding Deposited Plasmid |
|---|---|
| Lambda Zap | pBluescript (pBS) |
| Uni-Zap XR | pBluescript (pBS) |
| Zap Express | pBK |
| lafmid BA | plafmid BA |
| pSport1 | pSport1 |
| pCMVSport 2.0 | pCMVSport 2.0 |
| pCMVSport 3.0 | pCMVSport 3.0 |
| pCR ® 2.1 | pCR ® 2.1 |

[0857] Vectors Lambda Zap (U.S. Pat. Nos. 5,128,256 and 5,286,636), Uni-Zap XR (U.S. Pat. Nos. 5,128, 256 and 5,286,636), Zap Express (U.S. Pat. Nos. 5,128,256 and 5,286,636), pBluescript (pBS) (Short, J. M. et al., Nucleic Acids Res. 16:7583-7600 (1988); Alting-Mees, M. A. and Short, J. M., Nucleic Acids Res. 17:9494 (1989)) and pBK (Alting-Mees, M. A. et al., Strategies 5:58-61 (1992)) are commercially available from Stratagene Cloning Systems, Inc., 11011 N. Torrey Pines Road, La Jolla, Calif., 92037. pBS contains an ampicillin resistance gene and pBK contains a neomycin resistance gene. Both can be transformed into E. coli strain XL-1 Blue, also available from Stratagene. pBS comes in 4 forms SK+, SK−, KS+and KS. The S and K refers to the orientation of the polylinker to the T7 and T3 primer sequences which flank the polylinker region (“S” is for Sacd and “K” is for KpnI which are the first sites on each respective end of the linker). “+” or “−” refer to the orientation of the fl origin of replication (“ori”), such that in one orientation, single stranded rescue initiated from the fl ori generates sense strand DNA and in the other, antisense.

[0858] Vectors pSport1, pCMVSport 2.0 and pCMVSport 3.0, were obtained from Life Technologies, Inc., P. O. Box 6009, Gaithersburg, Md. 20897. All Sport vectors contain an ampicillin resistance gene and may be transformed into E. coli strain DH10B, also available from Life Technologies. (See, for instance, Gruber, C. E., et al., Focus 15:59 (1993).) Vector lafmid BA (Bento Soares, Columbia University, NY) contains an ampicillin resistance gene and can be transformed into E. coli strain XL-1 Blue. Vector pCR®2. 1, which is available from Invitrogen, 1600 Faraday Avenue, Carlsbad, Calif. 92008, contains an ampicillin resistance gene and may be transformed into E. coli strain DH10B, available from Life Technologies. (See, for instance, Clark, J. M., Nuc. Acids Res. 16:9677-9686 (1988) and Mead, D. et al., Bio/Technology 9: (1991).) Preferably, a polynucleotide of the present invention does not comprise the vector sequences identified for the particular clone in Table 7, as well as the corresponding plasmid vector sequences designated above.

[0859] The deposited material in the sample assigned the ATCC Deposit Number cited by reference to Tables 1A, 2, 6 and 7 for any given cDNA clone also may contain one or more additional plasmids, each comprising a cDNA clone different from that given clone. Thus, deposits sharing the same ATCC Deposit Number contain at least a plasmid for each Clone ID NO:Z.

TABLE 7

| | | | ATCC |
|---|---|---|---|
| Libraries owned by Catalog | Catalog Description | Vector | Deposit |
| HUKA HUKB HUKC HUKD HUKE | Human Uterine Cancer | Lambda ZAP II | LP01 |
| HUKF HUKG | | | |
| HCNA HCNB | Human Colon | Lambda Zap II | LP01 |
| HFFA | Human Fetal Brain, random primed | Lambda Zap II | LP01 |
| HTWA | Resting T-Cell | Lambda ZAP II | LP01 |
| HBQA | Early Stage Human Brain, random | Lambda ZAP II | LP01 |
| | primed | | |
| HLMB HLMF HLMG HLMH HLMI | breast lymph node CDNA library | Lambda ZAP II | LP01 |
| HLMJ HLMM HLMN | | | |
| HCQA HCQB | human colon cancer | Lamda ZAP II | LP01 |
| HMEA HMEC HMED HMEE HMEF | Human Microvascular Endothelial | Lambda ZAP II | LP01 |
| HMEG HMEI HMEJ HMEK HMEL | Cells, fract. A | | |
| HUSA HUSC | Human Umbilical Vein Endothelial | Lambda ZAP II | LP01 |
| | Cells, fract. A | | |
| HLQA HLQB | Hepatocellular Tumor | Lambda ZAP II | LP01 |
| HHGA HHGB HHGC HHGD | Hemangiopericytoma | Lambda ZAP II | LP01 |
| HSDM | Human Striatum Depression, re-rescue | Lambda ZAP II | LP01 |
| HUSH | H Umbilical Vein Endothelial Cells, | Lambda ZAP II | LP01 |
| | frac A, re-excision | | |
| HSGS | Salivary gland, subtracted | Lambda ZAP II | LP01 |
| HFXA HFXB HFXC HFXD HFXE | Brain frontal cortex | Lambda ZAP II | LP01 |
| HFXF HFXG HFXH | | | |
| HPQA HPQB HPQC | PERM TF274 | Lambda ZAP II | LP01 |
| HFXJ HFXK | Brain Frontal Cortex, re-excision | Lambda ZAP II | LP01 |
| HCWA HCWB HCWC HCWD HCWE | CD34 positive cells (Cord Blood) | ZAP Express | LP02 |
| HCWF HCWG HCWH HCWI HCWJ | | | |
| HCWK | | | |
| HCUA HCUB HCUC | CD34 depleted Buffy Coat (Cord | ZAP Express | LP02 |
| | Blood) | | |
| HRSM | A-14 cell line | ZAP Express | LP02 |
| HRSA | A1-CELL LINE | ZAP Express | LP02 |
| HCUD HCUE HCUF HCUG HCUH | CD34 depleted Buffy Coat (Cord | ZAP Express | LP02 |
| HCUI | Blood), re-excision | | |
| HBXE HBXF HBXG | H. Whole Brain #2, re-excision | ZAP Express | LP02 |
| HRLM | L8 cell line | ZAP Express | LP02 |
| HBXA HBXB HBXC HBXD | Human Whole Brain #2 - Oligo dT > | ZAP Express | LP02 |
| | 1.5 Kb | | |
| HUDA HUDB HUDC | Testes | ZAP Express | LP02 |
| HHTM HHTN HHTO | H. hypothalamus, frac A; re-excision | ZAP Express | LP02 |
| HHTL | H. hypothalamus, frac A | ZAP Express | LP02 |
| HASA HASD | Human Adult Spleen | Uni-ZAP XR | LP03 |
| HFKC HFKD HFKE HFKF HFKG | Human Fetal Kidney | Uni-ZAP XR | LP03 |
| HE8A HE8B HE8C HE8D HE8E HE8F | Human 8 Week Whole Embryo | Uni-ZAP XR | LP03 |
| HE8M HE8N | | | |
| HGBA HGBD HGBE HGBF HGBG | Human Gall Bladder | Uni-ZAP XR | LP03 |
| HGBH HGBI | | | |
| HLHA HLHB HLHC HLHD HLHE | Human Fetal Lung III | Uni-ZAP XR | LP03 |
| HLHF HLHG HLHH HLHQ | | | |
| HPMA HPMB HPMC HPMD HPME | Human Placenta | Uni-ZAP XR | LP03 |
| HPMF HPMG HPMH | | | |
| HPRA HPRB HPRC HPRD | Human Prostate | Uni-ZAP XR | LP03 |
| HSIA HSIC HSID HSIE | Human Adult Small Intestine | Uni-ZAP XR | LP03 |
| HTEA HTEB HTEC HTED HTEE | Human Testes | Uni-ZAP XR | LP03 |
| HTEF HTEG HTEH HTEI HTEJ HTEK | | | |
| HTPA HTPB HTPC HTPD HTPE | Human Pancreas Tumor | Uni-ZAP XR | LP03 |
| HTTA HTTB HTTC HTTD HTTE | Human Testes Tumor | Uni-ZAP XR | LP03 |
| HTTF | | | |
| HAPA HAPB HAPC HAPM | Human Adult Pulmonary | Uni-ZAP XR | LP03 |
| HETA HETB HETC HETD HETE | Human Endometrial Tumor | Uni-ZAP XR | LP03 |
| HETF HETG HETH HETI | | | |
| HHFB HHFC HHFD HHFE HHFF | Human Fetal Heart | Uni-ZAP XR | LP03 |
| HHFG HHFH HHFI | | | |
| HHPB HHPC HHPD HHPE HHPF | Human Hippocampus | Uni-ZAP XR | LP03 |
| HHPG HHPH | | | |
| HCE1 HCE2 HCE3 HCE4 HCE5 HCEB | Human Cerebellum | Uni-ZAP XR | LP03 |
| HCEC HCED HCEE HCEF HCEG | | | |
| HUVB HUVC HUVD HUVE | Human Umbilical Vein, Endo. remake | Uni-ZAP XR | LP03 |
| HSTA HSTB HSTC HSTD | Human Skin Tumor | Uni-ZAP XR | LP03 |
| HTAA HTAB HTAC HTAD HTAE | Human Activated T-Cells | Uni-ZAP XR | LP03 |
| HFEA HFEB HFEC | Human Fetal Epithelium (Skin) | Uni-ZAP XR | LP03 |
| HJPA HJPB HJPC HJPD | HUMAN JURKAT MEMBRANE | Uni-ZAP XR | LP03 |
| | BOUND POLYSOMES | | |
| HESA | Human epithelioid sarcoma | Uni-Zap XR | LP03 |
| HLTA HLTB HLTC HLTD HLTE | Human T-Cell Lymphoma | Uni-ZAP XR | LP03 |
| HLTF | | | |
| HFTA HFTB HFTC HFTD | Human Fetal Dura Mater | Uni-ZAP XR | LP03 |
| HRDA HRDB HRDC HRDD HRDE | Human Rhabdomyosarcoma | Uni-ZAP XR | LP03 |
| HRDF | | | |
| HCAA HCAB HCAC | Cem cells cyclohexamide treated | Uni-ZAP XR | LP03 |
| HRGA HRGB HRGC HRGD | Raji Cells, cyclohexamide treated | Uni-ZAP XR | LP03 |
| HSUA HSUB HSUC HSUM | Supt Cells, cyclohexamide treated | Uni-ZAP XR | LP03 |
| HT4A HT4C HT4D | Activated T-Cells, 12 hrs. | Uni-ZAP XR | LP03 |
| HE9A HE9B HE9C HE9D HE9E HE9F | Nine Week Old Early Stage Human | Uni-ZAP XR | LP03 |
| HE9G HE9H HE9M HE9N | | | |
| HATA HATB HATC HATD HATE | Human Adrenal Gland Tumor | Uni-ZAP XR | LP03 |
| HT5A | Activated T-Cells, 24 hrs. | Uni-ZAP XR | LP03 |
| HFGA HFGM | Human Fetal Brain | Uni-ZAP XR | LP03 |
| HNEA HNEB HNEC HNED HNEE | Human Neutrophil | Uni-ZAP XR | LP03 |
| HBGB HBGD | Human Primary Breast Cancer | Uni-ZAP XR | LP03 |
| HBNA HBNB | Human Normal Breast | Uni-ZAP XR | LP03 |
| HCAS | Cem Cells, cyclohexamide treated, | Uni-ZAP XR | LP03 |
| | subtra | | |
| HHPS | Human Hippocampus, subtracted | pBS | LP03 |
| HKCS HKCU | Human Colon Cancer, subtracted | pBS | LP03 |
| HRGS | Raji cells, cyclohexamide treated, | pBS | LP03 |
| | subtracted | | |
| HSUT | Supt cells, cyclohexamide treated, | pBS | LP03 |
| | differentially expressed | | |
| HT4S | Activated T-Cells, 12 hrs, subtracted | Uni-ZAP XR | LP03 |
| HCDA HCDB HCDC HCDD HCDE | Human Chondrosarcoma | Uni-ZAP XR | LP03 |
| HOAA HOAB HOAC | Human Osteosarcoma | Uni-ZAP XR | LP03 |
| HTLA HTLB HTLC HTLD HTLE | Human adult testis, large inserts | Uni-ZAP XR | LP03 |
| HTLF | | | |
| HLMA HLMC HLMD | Breast Lymph node cDNA library | Uni-ZAP XR | LP03 |
| H6EA H6EB H6EC | HL-60, PMA 4H | Uni-ZAP XR | LP03 |
| HTXA HTXB HTXC HTXD HTXE | Activated T-Cell (12hs)/Thiouridine | Uni-ZAP XR | LP03 |
| HTXF HTXG HTXH | labelledEco | | |
| HNFA HNFB HNFC HNFD HNFE | Human Neutrophil, Activated | Uni-ZAP XR | LP03 |
| HNFF HNFG HNFH HNFJ | | | |
| HTOB HTOC | HUMAN TONSILS, FRACTION 2 | Uni-ZAP XR | LP03 |
| HMGB | Human OB MG63 control fraction I | Uni-ZAP XR | LP03 |
| HOPB | Human OB HOS control fraction I | Uni-ZAP XR | LP03 |
| HORB | Human OB HOS treated (10 nM E2) | Uni-ZAP XR | LP03 |
| | fraction I | | |
| HSVA HSVB HSVC | Human Chronic Synovitis | Uni-ZAP XR | LP03 |
| HROA | HUMAN STOMACH | Uni-ZAP XR | LP03 |
| HBJA HBJB HBJC HBJD HBJE HBJF | HUMAN B CELL LYMPHOMA | Uni-ZAP XR | LP03 |
| HBJG HBJH HBJI HBJJ HBJK | | | |
| HCRA HCRB HCRC | human corpus colosum | Uni-ZAP XR | LP03 |
| HODA HODB HODC HODD | human ovarian cancer | Uni-ZAP XR | LP03 |
| HDSA | Dermatofibrosarcoma Protuberance | Uni-ZAP XR | LP03 |
| HMWA HMWB HMWC HMWD | Bone Marrow Cell Line (RS4; 11) | Uni-ZAP XR | LP03 |
| HMWE HMWF HMWG HMWH | | | |
| HMWI HMWJ | | | |
| HSOA | stomach cancer (human) | Uni-ZAP XR | LP03 |
| HERA | SKIN | Uni-ZAP XR | LP03 |
| HMDA | Brain-medulloblastoma | Uni-ZAP XR | LP03 |
| HGLA HGLB HGLD | Glioblastoma | Uni-ZAP XR | LP03 |
| HEAA | H. Atrophic Endometrium | Uni-ZAP XR | LP03 |
| HBCA HBCB | H. Lymph node breast Cancer | Uni-ZAP XR | LP03 |
| HPWT | Human Prostate BPH, re-excision | Uni-ZAP XR | LP03 |
| HFVG HFVH HFVI | Fetal Liver, subtraction II | pBS | LP03 |
| HNFI | Human Neutrophils, Activated, re- | pBS | LP03 |
| | excision | | |
| HBMB HBMC HBMD | Human Bone Marrow, re-excision | pBS | LP03 |
| HKML HKMM HKMN | H. Kidney Medulla, re-excision | pBS | LP03 |
| HKIX HKIY | H. Kidney Cortex, subtracted | pBS | LP03 |
| HADT | H. Amygdala Depression, subtracted | pBS | LP03 |
| H6AS | Hl-60, untreated, subtracted | Uni-ZAP XR | LP03 |
| H6ES | HL-60, PMA 4H, subtracted | Uni-ZAP XR | LP03 |
| H6BS | HL-60, RA 4 h, Subtracted | Uni-ZAP XR | LP03 |
| H6CS | HL-60, PMA 1 d, subtracted | Uni-ZAP XR | LP03 |
| HTXJ HTXK | Activated T-cell(12 h)/Thiouridine-re- | Uni-ZAP XR | LP03 |
| | excision | | |
| HMSA HMSB HMSC HMSD HMSE | Monocyte activated | Uni-ZAP XR | LP03 |
| HMSF HMSG HMSH HMSI HMSJ | | | |
| HMSK | | | |
| HAGA HAGB HAGC HAGD HAGE | Human Amygdala | Uni-ZAP XR | LP03 |
| HAGF | | | |
| HSRA HSRB HSRE | STROMAL-OSTEOCLASTOMA | Uni-ZAP XR | LP03 |
| HSRD HSRF HSRG HSRH | Human Osteoclastoma Stromal Cells - | Uni-ZAP XR | LP03 |
| | unamplified | | |
| HSQA HSQB HSQC HSQD HSQE | Stromal cell TF274 | Uni-ZAP XR | LP03 |
| HSQF HSQG | | | |
| HSKA HSKB HSKC HSKD HSKE | Smooth muscle, serum treated | Uni-ZAP XR | LP03 |
| HSKF HSKZ | | | |
| HSLA HSLB HSLC HSLD HSLE | Smooth muscle, control | Uni-ZAP XR | LP03 |
| HSLF HSLG | | | |
| HSDA HSDD HSDE HSDF HSDG | Spinal cord | Uni-ZAP XR | LP03 |
| HSDH | | | |
| HPWS | Prostate-BPH subtracted II | pBS | LP03 |
| HSKW HSKX HSKY | Smooth Muscle- HASTE normalized | pBS | LP03 |
| HFPB HFPC HFPD | H. Frontal cortex, epileptic; re-excision | Uni-ZAP XR | LP03 |
| HSDI HSDJ HSDK | Spinal Cord, re-excision | Uni-ZAP XR | LP03 |
| HSKN HSKO | Smooth Muscle Serum Treated, Norm | pBS | LP03 |
| HSKG HSKH HSKI | Smooth muscle, serum induced, re-exc | pBS | LP03 |
| HFCA HFCB HFCC HFCD HFCE | Human Fetal Brain | Uni-ZAP XR | LP04 |
| HFCF | | | |
| HPTA HPTB HPTD | Human Pituitary | Uni-ZAP XR | LP04 |
| HTHB HTHC HTHD | Human Thymus | Uni-ZAP XR | LP04 |
| HE6B HE6C HE6D HE6E HE6F HE6G | Human Whole Six Week Old Embryo | Uni-ZAP XR | LP04 |
| HE6S | | | |
| HSSA HSSB HSSC HSSD HSSE HSSF | Human Synovial Sarcoma | Uni-ZAP XR | LP04 |
| HSSG HSSH HSSI HSSJ HSSK | | | |
| HE7T | 7 Week Old Early Stage Human, | Uni-ZAP XR | LP04 |
| | subtracted | | |
| HEPA HEPB HEPC | Human Epididymus | Uni-ZAP XR | LP04 |
| HSNA HSNB HSNC HSNM HSNN | Human Synovium | Uni-ZAP XR | LP04 |
| HPFB HPFC HPFD HPFE | Human Prostate Cancer, Stage C | Uni-ZAP XR | LP04 |
| | fraction | | |
| HE2A HE2D HE2E HE2H HE2I HE2M | 12 Week Old Early Stage Human | Uni-ZAP XR | LP04 |
| HE2N HE2O | | | |
| HE2B HE2C HE2F HE2G HE2P HE2Q | 12 Week Old Early Stage Human, II | Uni-ZAP XR | LP04 |
| HPTS HPTT HPTU | Human Pituitary, subtracted | Uni-ZAP XR | LP04 |
| HAUA HAUB HAUC | Amniotic Cells - TNF induced | Uni-ZAP XR | LP04 |
| HAQA HAQB HAQC HAQD | Amniotic Cells - Primary Culture | Uni-ZAP XR | LP04 |
| HWTA HWTB HWTC | wilm's tumor | Uni-ZAP XR | LP04 |
| HBSD | Bone Cancer, re-excision | Uni-ZAP XR | LP04 |
| HSGB | Salivary gland, re-excision | Uni-ZAP XR | LP04 |
| HSJA HSJB HSJC | Smooth muscle-ILb induced | Uni-ZAP XR | LP04 |
| HSXA HSXB HSXC HSXD | Human Substantia Nigra | Uni-ZAP XR | LP04 |
| HSHA HSHB HSHC | Smooth muscle, IL1b induced | Uni-ZAP XR | LP04 |
| HOUA HOUB HOUC HOUD HOUE | Adipocytes | Uni-ZAP XR | LP04 |
| HPWA HPWB HPWC HPWD HPWE | Prostate BPH | Uni-ZAP XR | LP04 |
| HELA HELB HELC HELD HELE | Endothelial cells-control | Uni-ZAP XR | LP04 |
| HELF HELG HELH | | | |
| HEMA HEMB HEMC HEMD HEME | Endothelial-induced | Uni-ZAP XR | LP04 |
| HEMF HEMG HEMH | | | |
| HBIA HBIB HBIC | Human Brain, Striatum | Uni-ZAP XR | LP04 |
| HHSA HHSB HHSC HHSD HHSE | Human Hypothalmus, Schizophrenia | Uni-ZAP XR | LP04 |
| HNGA HNGB HNGC HNGD HNGE | neutrophils control | Uni-ZAP XR | LP04 |
| HNGF HNGG HNGH HNGI HNGJ | | | |
| HNHA HNHB HNHC HNHD HNHE | Neutrophils IL-1 and LPS induced | Uni-ZAP XR | LP04 |
| HNHF HNHG HNHH HNHI HNHJ | | | |
| HSDB HSDC | STRIATUM DEPRESSION | Uni-ZAP XR | LP04 |
| HHPT | Hypothalamus | Uni-ZAP XR | LP04 |
| HSAT HSAU HSAV HSAW HSAX | Anergic T-cell | Uni-ZAP XR | LP04 |
| HSAY HSAZ | | | |
| HBMS HBMT HBMU HBMV HBMW | Bone marrow | Uni-ZAP XR | LP04 |
| HBMX | | | |
| HOEA HOEB HOEC HOED HOEE | Osteoblasts | Uni-ZAP XR | LP04 |
| HOEF HOEJ | | | |
| HAIA HAIB HAIC HAID HAIE HAIF | Epithelial-TNFa and INF induced | Uni-ZAP XR | LP04 |
| HTGA HTGB HTGC HTGD | Apoptotic T-cell | Uni-ZAP XR | LP04 |
| HMCA HMCB HMCC HMCD HMCE | Macrophage-oxLDL | Uni-ZAP XR | LP04 |
| HMAA HMAB HMAC HMAD HMAE | Macrophage (GM-CSF treated) | Uni-ZAP XR | LP04 |
| HMAF HMAG | | | |
| HPHA | Normal Prostate | Uni-ZAP XR | LP04 |
| HPIA HPIB HPIC | LNCAP prostate cell line | Uni-ZAP XR | LP04 |
| HPJA HPJB HPJC | PC3 Prostate cell line | Uni-ZAP XR | LP04 |
| HOSE HOSF HOSG | Human Osteoclastoma, re-excision | Uni-ZAP XR | LP04 |
| HTGE HTGF | Apoptotic T-cell, re-excision | Uni-ZAP XR | LP04 |
| HMAJ HMAK | H Macrophage (GM-CSF treated), re- | Uni-ZAP XR | LP04 |
| | excision | | |
| HACB HACC HACD | Human Adipose Tissue, re-excision | Uni-ZAP XR | LP04 |
| HFPA | H. Frontal Cortex, Epileptic | Uni-ZAP XR | LP04 |
| HFAA HFAB HFAC HFAD HFAE | Alzheimers, spongy change | Uni-ZAP XR | LP04 |
| HFAM | Frontal Lobe, Dementia | Uni-ZAP XR | LP04 |
| HMIA HMIB HMIC | Human Manic Depression Tissue | Uni-ZAP XR | LP04 |
| HTSA HTSE HTSF HTSG HTSH | Human Thymus | pBS | LP05 |
| HPBA HPBB HPBC HPBD HPBE | Human Pineal Gland | pBS | LP05 |
| HSAA HSAB HSAC | HSA 172 Cells | pBS | LP05 |
| HSBA HSBB HSBC HSBM | HSC172 cells | pBS | LP05 |
| HJAA HJAB HJAC HJAD | Jurkat T-cell G1 phase | pBS | LP05 |
| HJBA HJBB HJBC HJBD | Jurkat T-Cell, S phase | pBS | LP05 |
| HAFA HAFB | Aorta endothelial cells + TNF-a | pBS | LP05 |
| HAWA HAWB HAWC | Human White Adipose | pBS | LP05 |
| HTNA HTNB | Human Thyroid | pBS | LP05 |
| HONA | Normal Ovary, Premenopausal | pBS | LP05 |
| HARA HARB | Human Adult Retina | pBS | LP05 |
| HLJA HLJB | Human Lung | pCMVSport 1 | LP06 |
| HOFM HOFN HOFO | H. Ovarian Tumor, II, OV5232 | pCMVSport 2.0 | LP07 |
| HOGA HOGB HOGC | OV Oct. 3, 1995 | pCMVSport 2.0 | LP07 |
| HCGL | CD34 + cells, II | pCMVSport 2.0 | LP07 |
| HDLA | Hodgkin's Lymphoma I | pCMVSport 2.0 | LP07 |
| HDTA HDTB HDTC HDTD HDTE | Hodgkin's Lymphoma II | pCMVSport 2.0 | LP07 |
| HKAA HKAB HKAC HKAD HKAE | Keratinocyte | pCMVSport2.0 | LP07 |
| HKAF HKAG HKAH | | | |
| HCIM | CAPFINDER, Crohn's Disease, lib 2 | pCMVSport 2.0 | LP07 |
| HKAL | Keratinocyte, lib 2 | pCMVSport2.0 | LP07 |
| HKAT | Keratinocyte, lib 3 | pCMVSport2.0 | LP07 |
| HNDA | Nasal polyps | pCMVSport2.0 | LP07 |
| HDRA | H. Primary Dendritic Cells, lib 3 | pCMVSport2.0 | LP07 |
| HOHA HOHB HOHC | Human Osteoblasts II | pCMVSport2.0 | LP07 |
| HLDA HLDB HLDC | Liver, Hepatoma | pCMVSport3.0 | LP08 |
| HLDN HLDO HLDP | Human Liver, normal | pCMVSport3.0 | LP08 |
| HMTA | pBMC stimulated w/ poly I/C | pCMVSport3.0 | LP08 |
| HNTA | NTERA2, control | pCMVSport3.0 | LP08 |
| HDPA HDPB HDPC HDPD HDPF | Primary Dendritic Cells, lib 1 | pCMVSport3.0 | LP08 |
| HDPG HDPH HDPI HDPJ HDPK | | | |
| HDPM HDPN HDPO HDPP | Primary Dendritic cells, frac 2 | pCMVSport3.0 | LP08 |
| HMUA HMUB HMUC | Myoloid Progenitor Cell Line | pCMVSport3.0 | LP08 |
| HHEA HHEB HHEC HHED | T Cell helper I | pCMVSport3.0 | LP08 |
| HHEM HHEN HHEO HHEP | T cell helper II | pCMVSport3.0 | LP08 |
| HEQA HEQB HEQC | Human endometrial stromal cells | pCMVSport3.0 | LP08 |
| HJMA HJMB | Human endometrial stromal cells- | pCMVSport3.0 | LP08 |
| | treated with progesterone | | |
| HSWA HSWB HSWC | Human endometrial stromal cells- | pCMVSport3.0 | LP08 |
| | treated with estradiol | | |
| HSYA HSYB HSYC | Human Thymus Stromal Cells | pCMVSport3.0 | LP08 |
| HLWA HLWB HLWC | Human Placenta | pCMVSport3.0 | LP08 |
| HRAA HRAB HRAC | Rejected Kidney, lib 4 | pCMVSport3.0 | LP08 |
| HMTM | PCR, pBMC I/C treated | PCRII | LP09 |
| HMJA | H. Meniingima, M6 | pSport 1 | LP10 |
| HMKA HMKB HMKC HMKD HMKE | H. Meningima, M1 | pSport 1 | LP10 |
| HUSG HUSI | Human umbilical vein endothelial cells, | pSport 1 | LP10 |
| | IL-4 induced | | |
| HUSX HUSY | Human Umbilical Vein Endothelial | pSport 1 | LP10 |
| | Cells, uninduced | | |
| HOFA | Ovarian Tumor I, OV5232 | pSport 1 | LP10 |
| HCFA HCFB HCFC HCFD | T-Cell PHA 16 hrs | pSport 1 | LP10 |
| HCFL HCFM HCFN HCFO | T-Cell PHA 24 hrs | pSport 1 | LP10 |
| HADA HADC HADD HADE HADF | Human Adipose | pSport 1 | LP10 |
| HADG | | | |
| HOVA HOVB HOVC | Human Ovary | pSport 1 | LP10 |
| HTWB HTWC HTWD HTWE HTWF | Resting T-Cell Library, II | pSport 1 | LP10 |
| HMMA | Spleen metastic melanoma | pSport 1 | LP10 |
| HLYA HLYB HLYC HLYD HLYE | Spleen, Chronic lymphocytic leukemia | pSport 1 | LP10 |
| HCGA | CD34 + cell, I | pSport 1 | LP10 |
| HEOM HEON | Human Eosinophils | pSport 1 | LP10 |
| HTDA | Human Tonsil, Lib 3 | pSport 1 | LP10 |
| HSPA | Salivary Gland, Lib 2 | pSport 1 | LP10 |
| HCHA HCHB HCHC | Breast Cancer cell line, MDA 36 | pSport 1 | LP10 |
| HCHM HCHN | Breast Cancer Cell line, angiogenic | pSport 1 | LP10 |
| HCIA | Crohn's Disease | pSport 1 | LP10 |
| HDAA HDAB HDAC | HEL cell line | pSport 1 | LP10 |
| HABA | Human Astrocyte | pSport 1 | LP10 |
| HUFA HUFB HUFC | Ulcerative Colitis | pSport 1 | LP10 |
| HNTM | NTERA2 + retinoic acid, 14 days | pSport 1 | LP10 |
| HDQA | Primary Dendritic cells, CapFinder2, | pSport 1 | LP10 |
| | frac 1 | | |
| HDQM | Primary Dendritic Cells, CapFinder, | pSport 1 | LP10 |
| | frac 2 | | |
| HLDX | Human Liver, | pSport 1 | LP10 |
| | normal, CapFinder□□□□ | | |
| HULA HULB HULC | Human Dermal Endothelial | pSport1 | LP10 |
| | Cells, untreated | | |
| HUMA | Human Dermal Endothelial cells, treated | pSport1 | LP10 |
| HCJA | Human Stromal Endometrial | pSport1 | LP10 |
| | fibroblasts, untreated | | |
| HCJM | Human Stromal endometrial fibroblasts, | pSport1 | LP10 |
| | treated w/ estradiol | | |
| HEDA | Human Stromal endometrial fibroblasts, | pSport1 | LP10 |
| | treated with progesterone | | |
| HFNA | Human ovary tumor cell OV350721 | pSport1 | LP10 |
| HKGA HKGB HKGC HKGD | Merkel Cells | pSport1 | LP10 |
| HISA HISB HISC | Pancreas Islet Cell Tumor | pSport1 | LP10 |
| HLSA | Skin, burned | pSport1 | LP10 |
| HBZA | Prostate, BPH, Lib 2 | pSport 1 | LP10 |
| HBZS | Prostate BPH, Lib 2, subtracted | pSport 1 | LP10 |
| HFIA HFIB HFIC | Synovial Fibroblasts (control) | pSport 1 | LP10 |
| HFIH HFII HFIJ | Synovial hypoxia | pSport 1 | LP10 |
| HFIT HFIU HFIV | Synovial IL-1/TNF stimulated | pSport 1 | LP10 |
| HGCA | Messangial cell, frac 1 | pSport1 | LP10 |
| HMVA HMVB HMVC | Bone Marrow Stromal Cell, untreated | pSport1 | LP10 |
| HFIX HFIY HFIZ | Synovial Fibroblasts (Il1/TNF), subt | pSport1 | LP10 |
| HFOX HFOY HFOZ | Synovial hypoxia-RSF subtracted | pSport1 | LP10 |
| HMQA HMQB HMQC HMQD | Human Activated Monocytes | Uni-ZAP XR | LP11 |
| HLIA HLIB HLIC | Human Liver | pCMVSport 1 | LP012 |
| HHBA HHBB HHBC HHBD HHBE | Human Heart | pCMVSport 1 | LP012 |
| HBBA HBBB | Human Brain | pCMVSport 1 | LP012 |
| HLJA HLJB HLJC HLJD HLJE | Human Lung | pCMVSport 1 | LP012 |
| HOGA HOGB HOGC | Ovarian Tumor | pCMVSport 2.0 | LP012 |
| HTJM | Human Tonsils, Lib 2 | pCMVSport 2.0 | LP012 |
| HAMF HAMG | KMH2 | pCMVSport 3.0 | LP012 |
| HAJA HAJB HAJC | L428 | pCMVSport 3.0 | LP012 |
| HWBA HWBB HWBC HWBD HWBE | Dendritic cells, pooled | pCMVSport 3.0 | LP012 |
| HWAA HWAB HWAC HWAD HWAE | Human Bone Marrow, treated | pCMVSport 3.0 | LP012 |
| HYAA HYAB HYAC | B Cell lymphoma | pCMVSport 3.0 | LP012 |
| HWHG HWHH HWHI | Healing groin wound, 6.5 hours post | pCMVSport 3.0 | LP012 |
| | incision | | |
| HWHP HWHQ HWHR | Healing groin wound; 7.5 hours post | pCMVSport 3.0 | LP012 |
| | incision | | |
| HARM | Healing groin wound - zero hr post- | pCMVSport 3.0 | LP012 |
| | incision (control) | | |
| HBIM | Olfactory epithelium; nasalcavity | pCMVSport 3.0 | LP012 |
| HWDA | Healing Abdomen wound; 70&90 min | pCMVSport 3.0 | LP012 |
| | post incision | | |
| HWEA | Healing Abdomen Wound; 15 days post | pCMVSport 3.0 | LP012 |
| | incision | | |
| HWJA | Healing Abdomen Wound; 21&29 days | pCMVSport 3.0 | LP012 |
| HNAL | Human Tongue, frac 2 | pSport1 | LP012 |
| HMJA | H. Meniingima, M6 | pSport1 | LP012 |
| HMKA HMKB HMKC HMKD HMKE | H. Meningima, M1 | pSport1 | LP012 |
| HOFA | Ovarian Tumor I, OV5232 | pSport1 | LP012 |
| HCFA HCFB HCFC HCFD | T-Cell PHA 16 hrs | pSport1 | LP012 |
| HCFL HCFM HCFN HCFO | T-Cell PHA 24 hrs | pSport1 | LP012 |
| HMMA HMMB HMMC | Spleen metastic melanoma | pSport1 | LP012 |
| HTDA | Human Tonsil, Lib 3 | pSport1 | LP012 |
| HDBA | Human Fetal Thymus | pSport1 | LP012 |
| HDUA | Pericardium | pSport1 | LP012 |
| HBZA | Prostate, BPH, Lib 2 | pSport1 | LP012 |
| HWCA | Larynx tumor | pSport1 | LP012 |
| HWKA | Normal lung | pSport1 | LP012 |
| HSMB | Bone marrow stroma, treated | pSport1 | LP012 |
| HBHM | Normal trachea | pSport1 | LP012 |
| HLFC | Human Larynx | pSport1 | LP012 |
| HLRB | Siebben Polyposis | pSport1 | LP012 |
| HNIA | Mammary Gland | pSport1 | LP012 |
| HNJB | Palate carcinoma | pSport1 | LP012 |
| HNKA | Palate normal | pSport1 | LP012 |
| HMZA | Pharynx carcinoma | pSport1 | LP012 |
| HABG | Cheek Carcinoma | pSport1 | LP012 |
| HMZM | Pharynx Carcinoma | pSport1 | LP012 |
| HDRM | Larynx Carcinoma | pSport1 | LP012 |
| HVAA | Pancreas normal PCA4 No | pSport1 | LP012 |
| HICA | Tongue carcinoma | pSport1 | LP012 |
| HUKA HUKB HUKC HUKD HUKE | Human Uterine Cancer | Lambda ZAP II | LP013 |
| HFFA | Human Fetal Brain, random primed | Lambda ZAP II | LP013 |
| HTUA | Activated T-cell labeled with 4-thioluri | Lambda ZAP II | LP013 |
| HBQA | Early Stage Human Brain, random | Lambda ZAP II | LP013 |
| | primed | | |
| HMEB | Human microvascular Endothelial cells, | Lambda ZAP II | LP013 |
| | fract. B | | |
| HUSH | Human Umbilical Vein Endothelial | Lambda ZAP II | LP013 |
| | cells, fract. A, re-excision | | |
| HLQC HLQD | Hepatocellular tumor, re-excision | Lambda ZAP II | LP013 |
| HTWJ HTWK HTWL | Resting T-cell, re-excision | Lambda ZAP II | LP013 |
| HF6S | Human Whole 6 week Old Embryo (II), | pBluescript | LP013 |
| | subt | | |
| HHPS | Human Hippocampus, subtracted | pBluescript | LP013 |
| HLIS | LNCAP, differential expression | pBluescript | LP013 |
| HLHS HLHT | Early Stage Human Lung, Subtracted | pBluescript | LP013 |
| HSUS | Supt cells, cyclohexamide treated, | pBluescript | LP013 |
| | subtracted | | |
| HSUT | Supt cells, cyclohexamide treated, | pBluescript | LP013 |
| | differentially expressed | | |
| HSDS | H Striatum Depression, subtracted | pBluescript | LP013 |
| HPTZ | Human Pituitary, Subtracted VII | pBluescript | LP013 |
| HSDX | H. Striatum Depression, subt II | pBluescript | LP013 |
| HSDZ | H. Striatum Depression, subt | pBluescript | LP013 |
| HPBA HPBB HPBC HPBD HPBE | Human Pineal Gland | pBluescript SK- | LP013 |
| HRTA | Colorectal Tumor | pBluescript SK- | LP013 |
| HSBA HSBB HSBC HSBM | HSC172 cells | pBluescript SK- | LP013 |
| HJAA HJAB HJAC HJAD | Jurkat T-cell G1 phase | pBluescript SK- | LP013 |
| HJBA HJBB HJBC HJBD | Jurkat T-cell, S1 phase | pBluescript SK- | LP013 |
| HTNA HTNB | Human Thyroid | pBluescript SK- | LP013 |
| HAHA HAHB | Human Adult Heart | Uni-ZAP XR | LP013 |
| HE6A | Whole 6 week Old Embryo | Uni-ZAP XR | LP013 |
| HFCA HFCB HFCC HFCD HFCE | Human Fetal Brain | Uni-ZAP XR | LP013 |
| HFKC HFKD HFKE HFKF HFKG | Human Fetal Kidney | Uni-ZAP XR | LP013 |
| HGBA HGBD HGBE HGBF HGBG | Human Gall Bladder | Uni-ZAP XR | LP013 |
| HPRA HPRB HPRC HPRD | Human Prostate | Uni-ZAP XR | LP013 |
| HTEA HTEB HTEC HTED HTEE | Human Testes | Uni-ZAP XR | LP013 |
| HTTA HTTB HTTC HTTD HTTE | Human Testes Tumor | Uni-ZAP XR | LP013 |
| HYBA HYBB | Human Fetal Bone | Uni-ZAP XR | LP013 |
| HFLA | Human Fetal Liver | Uni-ZAP XR | LP013 |
| HHFB HHFC HHFD HHFE HHFF | Human Fetal Heart | Uni-ZAP XR | LP013 |
| HUVB HUVC HUVD HUVE | Human Umbilical Vein, End. remake | Uni-ZAP XR | LP013 |
| HTHB HTHC HTHD | Human Thymus | Uni-ZAP XR | LP013 |
| HSTA HSTB HSTC HSTD | Human Skin Tumor | Uni-ZAP XR | LP013 |
| HTAA HTAB HTAC HTAD HTAE | Human Activated T-cells | Uni-ZAP XR | LP013 |
| HFEA HFEB HFEC | Human Fetal Epithelium (skin) | Uni-ZAP XR | LP013 |
| HJPA HJPB HJPC HJPD | Human Jurkat Membrane Bound | Uni-ZAP XR | LP013 |
| | Polysomes | | |
| HESA | Human Epithelioid Sarcoma | Uni-ZAP XR | LP013 |
| HALS | Human Adult Liver, Subtracted | Uni-ZAP XR | LP013 |
| HFTA HFTB HFTC HFTD | Human Fetal Dura Mater | Uni-ZAP XR | LP013 |
| HCAA HCAB HCAC | Cem cells, cyclohexamide treated | Uni-ZAP XR | LP013 |
| HRGA HRGB HRGC HRGD | Raji Cells, cyclohexamide treated | Uni-ZAP XR | LP013 |
| HE9A HE9B HE9C HE9D HE9E | Nine Week Old Early Stage Human | Uni-ZAP XR | LP013 |
| HSFA | Human Fibrosarcoma | Uni-ZAP XR | LP013 |
| HATA HATB HATC HATD HATE | Human Adrenal Gland Tumor | Uni-ZAP XR | LP013 |
| HTRA | Human Trachea Tumor | Uni-ZAP XR | LP013 |
| HE2A HE2D HE2E HE2H HE2I | 12 Week Old Early Stage Human | Uni-ZAP XR | LP013 |
| HE2B HE2C HE2F HE2G HE2P | 12 Week Old Early Stage Human, II | Uni-ZAP XR | LP013 |
| HNEA HNEB HNEC HNED HNEE | Human Neutrophil | Uni-ZAP XR | LP013 |
| HBGA | Human Primary Breast Cancer | Uni-ZAP XR | LP013 |
| HPTS HPTT HPTU | Human Pituitary, subtracted | Uni-ZAP XR | LP013 |
| HMQA HMQB HMQC HMQD | Human Activated Monocytes | Uni-ZAP XR | LP013 |
| HOAA HOAB HOAC | Human Osteosarcoma | Uni-ZAP XR | LP013 |
| HTOA HTOD HTOE HTOF HTOG | human tonsils | Uni-ZAP XR | LP013 |
| HMGB | Human OB MG63 control fraction I | Uni-ZAP XR | LP013 |
| HOPB | Human OB HOS control fraction I | Uni-ZAP XR | LP013 |
| HOQB | Human OB HOS treated (1 nM E2) | Uni-ZAP XR | LP013 |
| | fraction I | | |
| HAUA HAUB HAUC | Amniotic Cells - TNF induced | Uni-ZAP XR | LP013 |
| HAQA HAQB HAQC HAQD | Amniotic Cells - Primary Culture | Uni-ZAP XR | LP013 |
| HROA HROC | HUMAN STOMACH | Uni-ZAP XR | LP013 |
| HBJA HBJB HBJC HBJD HBJE | HUMAN B CELL LYMPHOMA | Uni-ZAP XR | LP013 |
| HODA HODB HODC HODD | human ovarian cancer | Uni-ZAP XR | LP013 |
| HCPA | Corpus Callosum | Uni-ZAP XR | LP013 |
| HSOA | stomach cancer (human) | Uni-ZAP XR | LP013 |
| HERA | SKIN | Uni-ZAP XR | LP013 |
| HMDA | Brain-medulloblastoma | Uni-ZAP XR | LP013 |
| HGLA HGLB HGLD | Glioblastoma | Uni-ZAP XR | LP013 |
| HWTA HWTB HWTC | wilm's tumor | Uni-ZAP XR | LP013 |
| HEAA | H. Atrophic Endometrium | Uni-ZAP XR | LP013 |
| HAPN HAPO HAPP HAPQ HAPR | Human Adult Pulmonary; re-excision | Uni-ZAP XR | LP013 |
| HLTG HLTH | Human T-cell lymphoma; re-excision | Uni-ZAP XR | LP013 |
| HAHC HAHD HAHE | Human Adult Heart; re-excision | Uni-ZAP XR | LP013 |
| HAGA HAGB HAGC HAGD HAGE | Human Amygdala | Uni-ZAP XR | LP013 |
| HSJA HSJB HSJC | Smooth muscle-ILb induced | Uni-ZAP XR | LP013 |
| HSHA HSHB HSHC | Smooth muscle, IL1b induced | Uni-ZAP XR | LP013 |
| HPWA HPWB HPWC HPWD HPWE | Prostate BPH | Uni-ZAP XR | LP013 |
| HPIA HPIB HPIC | LNCAP prostate cell line | Uni-ZAP XR | LP013 |
| HPJA HPJB HPJC | PC3 Prostate cell line | Uni-ZAP XR | LP013 |
| HBTA | Bone Marrow Stroma, TNF&LPS ind | Uni-ZAP XR | LP013 |
| HMCF HMCG HMCH HMCI HMCJ | Macrophage-oxLDL; re-excision | Uni-ZAP XR | LP013 |
| HAGG HAGH HAGI | Human Amygdala; re-excision | Uni-ZAP XR | LP013 |
| HACA | H. Adipose Tissue | Uni-ZAP XR | LP013 |
| HKFB | K562 + PMA (36 hrs), re-excision | ZAP Express | LP013 |
| HCWT HCWU HCWV | CD34 positive cells (cord blood), re-ex | ZAP Express | LP013 |
| HBWA | Whole brain | ZAP Express | LP013 |
| HBXA HBXB HBXC HBXD | Human Whole Brain #2 - Oligo dT > | ZAP Express | LP013 |
| | 1.5 Kb | | |
| HAVM | Temporal cortex-Alzheizmer | pT-Adv | LP014 |
| HAVT | Hippocampus, Alzheimer Subtracted | pT-Adv | LP014 |
| HHAS | CHME Cell Line | Uni-ZAP XR | LP014 |
| HAJR | Larynx normal | pSport 1 | LP014 |
| HWLE HWLF HWLG HWLH | Colon Normal | pSport 1 | LP014 |
| HCRM HCRN HCRO | Colon Carcinoma | pSport 1 | LP014 |
| HWLI HWLJ HWLK | Colon Normal | pSport 1 | LP014 |
| HWLQ HWLR HWLS HWLT | Colon Tumor | pSport 1 | LP014 |
| HBFM | Gastrocnemius Muscle | pSport 1 | LP014 |
| HBOD HBOE | Quadriceps Muscle | pSport 1 | LP014 |
| HBKD HBKE | Soleus Muscle | pSport 1 | LP014 |
| HCCM | Pancreatic Langerhans | pSport 1 | LP014 |
| HWGA | Larynx carcinoma | pSport 1 | LP014 |
| HWGM HWGN | Larynx carcinoma | pSport 1 | LP014 |
| HWLA HWLB HWLC | Normal colon | pSport 1 | LP014 |
| HWLM HWLN | Colon Tumor | pSport 1 | LP014 |
| HVAM HVAN HVAO | Pancreas Tumor | pSport 1 | LP014 |
| HWGQ | Larynx carcinoma | pSport 1 | LP014 |
| HAQM HAQN | Salivary Gland | pSport 1 | LP014 |
| HASM | Stomach; normal | pSport 1 | LP014 |
| HBCM | Uterus; normal | pSport 1 | LP014 |
| HCDM | Testis; normal | pSport 1 | LP014 |
| HDJM | Brain; normal | pSport 1 | LP014 |
| HEFM | Adrenal Gland, normal | pSport 1 | LP014 |
| HBAA | Rectum normal | pSport 1 | LP014 |
| HFDM | Rectum tumour | pSport 1 | LP014 |
| HGAM | Colon, normal | pSport 1 | LP014 |
| HHMM | Colon, tumour | pSport 1 | LP014 |
| HCLB HCLC | Human Lung Cancer | Lambda Zap II | LP015 |
| HRLA | L1 Cell line | ZAP Express | LP015 |
| HHAM | Hypothalamus, Alzheimer's | pCMVSport 3.0 | LP015 |
| HKBA | Ku 812F Basophils Line | pSport 1 | LP015 |
| HS2S | Saos2, Dexamethosome Treated | pSport 1 | LP016 |
| HA5A | Lung Carcinoma A549 TNFalpha | pSport 1 | LP016 |
| | activated | | |
| HTFM | TF-1 Cell Line GM-CSF Treated | pSport 1 | LP016 |
| HYAS | Thyroid Tumour | pSport 1 | LP016 |
| HUTS | Larynx Normal | pSport 1 | LP016 |
| HXOA | Larynx Tumor | pSport 1 | LP016 |
| HEAH | Ea.hy.926 cell line | pSport 1 | LP016 |
| HINA | Adenocarcinoma Human | pSport 1 | LP016 |
| HRMA | Lung Mesothelium | pSport 1 | LP016 |
| HLCL | Human Pre-Differentiated Adipocytes | Uni-Zap XR | LP017 |
| HS2A | Saos2 Cells | pSport 1 | LP020 |
| HS2I | Saos2 Cells; Vitamin D3 Treated | pSport 1 | LP020 |
| HUCM | CHME Cell Line, untreated | pSport 1 | LP020 |
| HEPN | Aryepiglottis Normal | pSport 1 | LP020 |
| HPSN | Sinus Piniformis Tumour | pSport 1 | LP020 |
| HNSA | Stomach Normal | pSport 1 | LP020 |
| HNSM | Stomach Tumour | pSport 1 | LP020 |
| HNLA | Liver Normal Met5No | pSport 1 | LP020 |
| HUTA | Liver Tumour Met 5 Tu | pSport 1 | LP020 |
| HOCN | Colon Normal | pSport 1 | LP020 |
| HOCT | Colon Tumor | pSport 1 | LP020 |
| HTNT | Tongue Tumour | pSport 1 | LP020 |
| HLXN | Larynx Normal | pSport 1 | LP020 |
| HLXT | Larynx Tumour | pSport 1 | LP020 |
| HTYN | Thymus | pSport 1 | LP020 |
| HPLN | Placenta | pSport 1 | LP020 |
| HTNG | Tongue Normal | pSport 1 | LP020 |
| HZAA | Thyroid Normal (SDCA2 No) | pSport 1 | LP020 |
| HWES | Thyroid Thyroiditis | pSport 1 | LP020 |
| HFHD | Ficolled Human Stromal Cells, 5Fu | pTrip1Ex2 | LP021 |
| | treated | | |
| HFHM, HFHN | Ficolled Human Stromal Cells, | pTrip1Ex2 | LP021 |
| | Untreated | | |
| HPCI | Hep G2 Cells, lambda library | lambda Zap-CMV XR | LP021 |
| HBCA, HBCB, HBCC | H. Lymph node breast Cancer | Uni-ZAP XR | LP021 |
| HCOK | Chondrocytes | pSPORT1 | LP022 |
| HDCA, HDCB, HDCC | Dendritic Cells From CD34 Cells | pSPORT1 | LP022 |
| HDMA, HDMB | CD40 activated monocyte dendritic | pSPORT1 | LP022 |
| | cells | | |
| HDDM, HDDN, HDDO | LPS activated derived dendritic cells | pSPORT1 | LP022 |
| HPCR | Hep G2 Cells, PCR library | lambda Zap-CMV XR | LP022 |
| HAAA, HAAB, HAAC | Lung, Cancer (4005313A3): Invasive | pSPORT1 | LP022 |
| | Poorly Differentiated Lung | | |
| | Adenocarcinoma | | |
| HIPA, HIPB, HIPC | Lung, Cancer (4005163 B7): Invasive, | pSPORT1 | LP022 |
| | Poorly Diff. Adenocarcinoma, | | |
| | Metastatic | | |
| HOOH, HOOI | Ovary, Cancer: (4004562 B6) Papillary | pSPORT1 | LP022 |
| | Serous Cystic Neoplasm, Low | | |
| | Malignant Pot | | |
| HIDA | Lung, Normal: (4005313 B1) | pSPORT1 | LP022 |
| HUJA, HUJB, HUJC, HUJD, HUJE | B-Cells | pCMVSport 3.0 | LP022 |
| HNOA, HNOB, HNOC, HNOD | Ovary, Normal: (9805C040R) | pSPORT1 | LP022 |
| HNLM | Lung, Normal: (4005313 B1) | pSPORT1 | LP022 |
| HSCL | Stromal Cells | pSPORT1 | LP022 |
| HAAX | Lung, Cancer: (4005313 A3) Invasive | pSPORT1 | LP022 |
| | Poorly-differentiated Metastatic lung | | |
| | adenocarcinoma | | |
| HUUA, HUUB, HUUC, HUUD | B-cells (unstimulated) | pTrip1Ex2 | LP022 |
| HWWA, HWWB, HWWC, HWWD, HWWE, | B-cells (stimulated) | pSPORT1 | LP022 |
| HWWF, HWWG | | | |
| HCCC | Colon, Cancer: (9808C064R) | pCMVSport 3.0 | LP023 |
| HPDO HPDP HPDQ HPDR HPD | Ovary, Cancer (9809C332): Poorly | pSport 1 | LP023 |
| | differentiated adenocarcinoma | | |
| HPCO HPCP HPCQ HPCT | Ovary, Cancer (15395A1F): Grade II | pSport 1 | LP023 |
| | Papillary Carcinoma | | |
| HOCM HOCO HOCP HOCQ | Ovary, Cancer: (15799A1F) Poorly | pSport 1 | LP023 |
| | differentiated carcinoma | | |
| HCBM HCBN HCBO | Breast, Cancer: (4004943 A5) | pSport 1 | LP023 |
| HNBT HNBU HNBV | Breast, Normal: (4005522B2) | pSport 1 | LP023 |
| HBCP HBCQ | Breast, Cancer: (4005522 A2) | pSport 1 | LP023 |
| HBCJ | Breast, Cancer: (9806C012R) | pSport 1 | LP023 |
| HSAM HSAN | Stromal cells 3.88 | pSport 1 | LP023 |
| HVCA HVCB HVCC HVCD | Ovary, Cancer: (4004332 A2) | pSport 1 | LP023 |
| HSCK HSEN HSEO | Stromal cells (HBM3.18) | pSport 1 | LP023 |
| HSCP HSCQ | stromal cell clone 2.5 | pSport 1 | LP023 |
| HUXA | Breast Cancer: (4005385 A2) | pSport 1 | LP023 |
| HCOM HCON HCOO HCOP HCOQ | Ovary, Cancer (4004650 A3): Well- | pSport 1 | LP023 |
| | Differentiated Micropapillary Serous | | |
| | Carcinoma | | |
| HBNM | Breast, Cancer: (9802C020E) | pSport 1 | LP023 |
| HVVA HVVB HVVC HVVD HVVE | Human Bone Marrow, treated | pSport 1 | LP023 |

[0860] Two nonlimiting examples are provided below for isolating a particular clone from the deposited sample of plasmid cDNAs cited for that clone in Table 7. First, a plasmid is directly isolated by screening the clones using a polynucleotide probe corresponding to the nucleotide sequence of SEQ ID NO:X.

[0861] Particularly, a specific polynucleotide with 30-40 nucleotides is synthesized using an Applied Biosystems DNA synthesizer according to the sequence reported. The oligonucleotide is labeled, for instance, with ³²P-γ-ATP using T4 polynucleotide kinase and purified according to routine methods. (E.g., Maniatis et al., Molecular Cloning: A Laboratory Manual, Cold Spring Harbor Press, Cold Spring, N.Y. (1982).) The plasmid mixture is transformed into a suitable host, as indicated above (such as XL-1 Blue (Stratagene)) using techniques known to those of skill in the art, such as those provided by the vector supplier or in related publications or patents cited above. The transformants are plated on 1.5% agar plates (containing the appropriate selection agent, e.g., ampicillin) to a density of about 150 transformants (colonies) per plate. These plates are screened using Nylon membranes according to routine methods for bacterial colony screening (e.g., Sambrook et al., Molecular Cloning: A Laboratory Manual, 2nd Edit., (1989), Cold Spring Harbor Laboratory Press, pages 1.93 to 1.104), or other techniques known to those of skill in the art.

[0862] Alternatively, two primers of 17-20 nucleotides derived from both ends of the nucleotide sequence of SEQ ID NO:X are synthesized and used to amplify the desired cDNA using the deposited cDNA plasmid as a template. The polymerase chain reaction is carried out under routine conditions, for instance, in 25 μl of reaction mixture with 0.5 ug of the above cDNA template. A convenient reaction mixture is 1.5-5 mM MgCl₂, 0.01% (w/v) gelatin, 20 μM each of dATP, dCTP, dGTP, dTTP, 25 pmol of each primer and 0.25 Unit of Taq polymerase. Thirty five cycles of PCR (denaturation at 94° C. for 1 min; annealing at 55° C. for 1 min; elongation at 72° C. for 1 min) are performed with a Perkin-Elmer Cetus automated thermal cycler. The amplified product is analyzed by agarose gel electrophoresis and the DNA band with expected molecular weight is excised and purified. The PCR product is verified to be the selected sequence by subcloning and sequencing the DNA product.

[0863] Several methods are available for the identification of the 5′ or 3′ non-coding portions of a gene which may not be present in the deposited clone. These methods include but are not limited to, filter probing, clone enrichment using specific probes, and protocols similar or identical to 5′ and 3′“RACE” protocols which are well known in the art. For instance, a method similar to 5′ RACE is available for generating the missing 5′ end of a desired full-length transcript. (Fromont-Racine et al., Nucleic Acids Res. 21(7):1683-1684 (1993).)

[0864] Briefly, a specific RNA oligonucleotide is ligated to the 5′ ends of a population of RNA presumably containing full-length gene RNA transcripts. A primer set containing a primer specific to the ligated RNA oligonucleotide and a primer specific to a known sequence of the gene of interest is used to PCR amplify the 5′ portion of the desired full-length gene. This amplified product may then be sequenced and used to generate the full length gene.

[0865] This above method starts with total RNA isolated from the desired source, although poly-A+RNA can be used. The RNA preparation can then be treated with phosphatase if necessary to eliminate 5′ phosphate groups on degraded or damaged RNA which may interfere with the later RNA ligase step. The phosphatase should then be inactivated and the RNA treated with tobacco acid pyrophosphatase in order to remove the cap structure present at the 5′ ends of messenger RNAs. This reaction leaves a 5′ phosphate group at the 5′ end of the cap cleaved RNA which can then be ligated to an RNA oligonucleotide using T4 RNA ligase.

[0866] This modified RNA preparation is used as a template for first strand cDNA synthesis using a gene specific oligonucleotide. The first strand synthesis reaction is used as a template for PCR amplification of the desired 5′ end using a primer specific to the ligated RNA oligonucleotide and a primer specific to the known sequence of the gene of interest. The resultant product is then sequenced and analyzed to confirm that the 5′ end sequence belongs to the desired gene.

### Example 2

### Isolation of Genomic Clones Corresponding to a Polynucleotide

[0867] A human genomic P1 library (Genomic Systems, Inc.) is screened by PCR using primers selected for the sequence corresponding to SEQ ID NO:X according to the method described in Example 1. (See also, Sambrook et al., Molecular Cloning: A Laboratory Manual, 2nd Edn., (1989), Cold Spring Harbor Laboratory Press).

### Example 3

### Tissue Specific Expression Analysis

[0868] The Human Genome Sciences, Inc. (HGS) database is derived from sequencing tissue and/or disease specific cDNA libraries. Libraries generated from a particular tissue are selected and the specific tissue expression pattern of EST groups or assembled contigs within these libraries is determined by comparison of the expression patterns of those groups or contigs within the entire database. ESTs and assembled contigs which show tissue specific expression are selected.

[0869] The original clone from which the specific EST sequence was generated, or in the case of an assembled contig, the clone from which the 5′ most EST sequence was generated, is obtained from the catalogued library of clones and the insert amplified by PCR using methods known in the art. The PCR product is denatured and then transferred in 96 or 384 well format to a nylon membrane (Schleicher and Scheull) generating an array filter of tissue specific clones. Housekeeping genes, maize genes, and known tissue specific genes are included on the filters. These targets can be used in signal normalization and to validate assay sensitivity. Additional targets are included to monitor probe length and specificity of hybridization.

[0870] Radioactively labeled hybridization probes are generated by first strand cDNA synthesis per the manufacturer's instructions (Life Technologies) from mRNA/RNA samples prepared from the specific tissue being analyzed (e.g., prostate, prostate cancer, etc.). The hybridization probes are purified by gel exclusion chromatography, quantitated, and hybridized with the array filters in hybridization bottles at 65° C. overnight. The filters are washed under stringent conditions and signals are captured using a Fuji phosphorimager.

[0871] Data is extracted using AIS software and following background subtraction, signal normalization is performed. This includes a normalization of filter-wide expression levels between different experimental runs. Genes that are differentially expressed in the tissue of interest are identified.

### Example 4

### Chromosomal Mapping of the Polynucleotides

[0872] An oligonucleotide primer set is designed according to the sequence at the 5′ end of SEQ ID NO:X. This primer preferably spans about 100 nucleotides. This primer set is then used in a polymerase chain reaction under the following set of conditions: 30 seconds, 95° C.; 1 minute, 56° C.; 1 minute, 70° C. This cycle is repeated 32 times followed by one 5 minute cycle at 70° C. Human, mouse, and hamster DNA is used as template in addition to a somatic cell hybrid panel containing individual chromosomes or chromosome fragments (Bios, Inc). The reactions are analyzed on either 8% polyacrylamide gels or 3.5% agarose gels. Chromosome mapping is determined by the presence of an approximately 100 bp PCR fragment in the particular somatic cell hybrid.

### Example 5

### Bacterial Expression of a Polypeptide

[0873] A polynucleotide encoding a polypeptide of the present invention is amplified using PCR oligonucleotide primers corresponding to the 5′ and 3′ ends of the DNA sequence, as outlined in Example 1, to synthesize insertion fragments. The primers used to amplify the cDNA insert should preferably contain restriction sites, such as BamHI and XbaI, at the 5′ end of the primers in order to clone the amplified product into the expression vector. For example, BamHI and XbaI correspond to the restriction enzyme sites on the bacterial expression vector pQE-9. (Qiagen, Inc., Chatsworth, Calif.). This plasmid vector encodes antibiotic resistance (Amp^{r}), a bacterial origin of replication (ori), an IPTG-regulatable promoter/operator (P/O), a ribosome binding site (RBS), a 6-histidine tag (6-His), and restriction enzyme cloning sites.

[0874] The pQE-9 vector is digested with BamHI and XbaI and the amplified fragment is ligated into the pQE-9 vector maintaining the reading frame initiated at the bacterial RBS. The ligation mixture is then used to transform the E. coli strain M15/rep4 (Qiagen, Inc.) which contains multiple copies of the plasmid pREP4, which expresses the lacd repressor and also confers kanamycin resistance (Kan^{r}). Transformants are identified by their ability to grow on LB plates and ampicillin/kanamycin resistant colonies are selected. Plasmid DNA is isolated and confirmed by restriction analysis.

[0875] Clones containing the desired constructs are grown overnight (O/N) in liquid culture in LB media supplemented with both Amp (100 ug/ml) and Kan (25 ug/ml). The O/N culture is used to inoculate a large culture at a ratio of 1:100 to 1:250. The cells are grown to an optical density 600 (O.D.⁶⁰⁰) of between 0.4 and 0.6. IPTG (Isopropyl-B-D-thiogalacto pyranoside) is then added to a final concentration of 1 mM. IPTG induces by inactivating the lacI repressor, clearing the P/O leading to increased gene expression.

[0876] Cells are grown for an extra 3 to 4 hours. Cells are then harvested by centrifugation (20 mins at 6000×g). The cell pellet is solubilized in the chaotropic agent 6 Molar Guanidine HCI by stirring for 3-4 hours at 4° C. The cell debris is removed by centrifugation, and the supernatant containing the polypeptide is loaded onto a nickel-nitrilo-tri-acetic acid (“Ni-NTA”) affinity resin column (available from QIAGEN, Inc., supra). Proteins with a 6×His tag bind to the Ni-NTA resin with high affinity and can be purified in a simple one-step procedure (for details. see: The QIAexpressionist (1995) QIAGEN, Inc., supra).

[0877] Briefly, the supernatant is loaded onto the column in 6 M guanidine-HCl, pH 8. The column is first washed with 10 volumes of 6 M guanidine-HCl, pH 8, then washed with 10 volumes of 6 M guanidine-HCI pH 6, and finally the polypeptide is eluted with 6 M guanidine-HCl, pH 5.

[0878] The purified protein is then renatured by dialyzing it against phosphate-buffered saline (PBS) or 50 mM Na-acetate, pH 6 buffer plus 200 mM NaCl. Alternatively, the protein can be successfully refolded while immobilized on the Ni-NTA column. The recommended conditions are as follows: renature using a linear 6M-1M urea gradient in 500 mM NaCl, 20% glycerol, 20 mM Tris/HCI pH 7.4, containing protease inhibitors. The renaturation should be performed over a period of 1.5 hours or more. After renaturation the proteins are eluted by the addition of 250 mM immidazole. Immidazole is removed by a final dialyzing step against PBS or 50 mM sodium acetate pH 6 buffer plus 200 mM NaCl. The purified protein is stored at 4° C. or frozen at −80° C.

[0879] In addition to the above expression vector, the present invention further includes an expression vector, called pHE4a (ATCC Accession Number 209645, deposited on Feb. 25, 1998) which contains phage operator and promoter elements operatively linked to a polynucleotide of the present invention. This vector contains: 1) a neomycinphosphotransferase gene as a selection marker, 2) an E. coli origin of replication, 3) a T5 phage promoter sequence, 4) two lac operator sequences, 5) a Shine-Delgarno sequence, and 6) the lactose operon repressor gene (lacIq). The origin of replication (oriC) is derived from pUC19 (LTI, Gaithersburg, Md.). The promoter and operator-sequences are made synthetically.

[0880] DNA can be inserted into the pHE4a by restricting the vector with NdeI and XbaI, BamHI, XhoI, or Asp718, running the restricted product on a gel, and isolating the larger fragment (the stuffer fragment should be about 310 base pairs). The DNA insert is generated according to the PCR protocol described in Example 1, using PCR primers having restriction sites for NdeI (5′ primer) and XbaI, BamHI, XhoI, or Asp718 (3′ primer). The PCR insert is gel purified and restricted with compatible enzymes. The insert and vector are ligated according to standard protocols.

[0881] The engineered vector could easily be substituted in the above protocol to express protein in a bacterial system.

### Example 6

### Purification of a Polypeptide from an Inclusion Body

[0882] The following alternative method can be used to purify a polypeptide expressed in E coli when it is present in the form of inclusion bodies. Unless otherwise specified, all of the following steps are conducted at 4-10° C.

[0883] Upon completion of the production phase of the E. coli fermentation, the cell culture is cooled to 4-10° C. and the cells harvested by continuous centrifugation at 15,000 rpm (Heraeus Sepatech). On the basis of the expected yield of protein per unit weight of cell paste and the amount of purified protein required, an appropriate amount of cell paste, by weight, is suspended in a buffer solution containing 100 mM Tris, 50 mM EDTA, pH 7.4. The cells are dispersed to a homogeneous suspension using a high shear mixer.

[0884] The cells are then lysed by passing the solution through a microfluidizer (Microfuidics, Corp. or APV Gaulin, Inc.) twice at 4000-6000 psi. The homogenate is then mixed with NaCl solution to a final concentration of 0.5 M NaCl, followed by centrifugation at 7000×g for 15 min. The resultant pellet is washed again using 0.5M NaCl, 100 mM Tris, 50 mM EDTA, pH 7.4.

[0885] The resulting washed inclusion bodies are solubilized with 1.5 M guanidine hydrochloride (GuHCl) for 2-4 hours. After 7000×g centrifugation for 15 min., the pellet is discarded and the polypeptide containing supernatant is incubated at 4° C. overnight to allow further GuHCl extraction.

[0886] Following high speed centrifugation (30,000×g) to remove insoluble particles, the GuHCl solubilized protein is refolded by quickly mixing the GuHCl extract with 20 volumes of buffer containing 50 mM sodium, pH 4.5, 150 mM NaCl, 2 mM EDTA by vigorous stirring. The refolded diluted protein solution is kept at 4° C. without mixing for 12 hours prior to further purification steps.

[0887] To clarify the refolded polypeptide solution, a previously prepared tangential filtration unit equipped with 0.16 μm membrane filter with appropriate surface area (e.g., Filtron), equilibrated with 40 mM sodium acetate, pH 6.0 is employed. The filtered sample is loaded onto a cation exchange resin (e.g., Poros HS-50, Perseptive Biosystems). The column is washed with 40 mM sodium acetate, pH 6.0 and eluted with 250 nM, 500 mM, 1000 mM, and 1500 mM NaCl in the same buffer, in a stepwise manner. The absorbance at 280 nm of the effluent is continuously monitored. Fractions are collected and further analyzed by SDS-PAGE.

[0888] Fractions containing the polypeptide are then pooled and mixed with 4 volumes of water. The diluted sample is then loaded onto a previously prepared set of tandem columns of strong anion (Poros HQ-50, Perseptive Biosystems) and weak anion (Poros CM-20, Perseptive Biosystems) exchange resins. The -columns are equilibrated with 40 mM sodium acetate, pH 6.0. Both columns are washed with 40 mM sodium acetate, pH 6.0, 200 mM NaCl. The CM-20 column is then eluted using a 10 column volume linear gradient ranging from 0.2 M NaCl, 50 mM sodium acetate, pH 6.0 to 1.0 M NaCl, 50 mM sodium acetate, pH 6.5. Fractions are collected under constant A₂₈₀ monitoring of the effluent. Fractions containing the polypeptide (determined, for instance, by 16% SDS-PAGE) are then pooled.

[0889] The resultant polypeptide should exhibit greater than 95% purity after the above refolding and purification steps. No major contaminant bands should be observed from Commassie blue stained 16% SDS-PAGE gel when 5 μg of purified protein is loaded. The purified protein can also be tested for endotoxin/LPS contamination, and typically the LPS content is less than 0.1 ng/ml according to LAL assays.

### Example 7

### Cloning and Expression of a Polypeptide in a Baculovirus Expression System

[0890] In this example, the plasmid shuttle vector pA2 is used to insert a polynucleotide into a baculovirus to express a polypeptide. This expression vector contains the strong polyhedrin promoter of the Autographa californica nuclear polyhedrosis virus (AcMNPV) followed by convenient restriction sites such as BamHI, Xba I and Asp718. The polyadenylation site of the simian virus 40 (“SV40”) is used for efficient polyadenylation. For easy selection of recombinant virus, the plasmid contains the beta-galactosidase gene from E. coli under control of a weak Drosophila promoter in the same orientation, followed by the polyadenylation signal of the polyhedrin gene. The inserted genes are flanked on both sides by viral sequences for cell-mediated homologous recombination with wild-type viral DNA to generate a viable virus that express the cloned polynucleotide.

[0891] Many other baculovirus vectors can be used in place of the vector above, such as pAc373, pVL941, and pAcIM1, as one skilled in the art would appreciate, as long as the construct provides appropriately located signals for transcription, translation, secretion and the like, including a signal peptide and an in-frame AUG as required. Such vectors are described, for instance, in Luckow et al., Virology 170:31-39 (1989).

[0892] Specifically, the cDNA sequence contained in the deposited clone, including the AUG initiation codon, is amplified using the PCR protocol described in Example 1. If a naturally occurring signal sequence is used to produce the polypeptide of the present invention, the pA2 vector does not need a second signal peptide. Alternatively, the vector can be modified (pA2 GP) to include a baculovirus leader sequence, using the standard methods described in Summers et al., “A Manual of Methods for Baculovirus Vectors and Insect Cell Culture Procedures,” Texas Agricultural Experimental Station Bulletin No. 1555 (1987).

[0893] The amplified fragment is isolated from a 1% agarose gel using a commercially available kit (“Geneclean,” BIO 101 Inc., La Jolla, Calif.). The fragment then is digested with appropriate restriction enzymes and again purified on a 1% agarose gel.

[0894] The plasmid is digested with the corresponding restriction enzymes and optionally, can be dephosphorylated using calf intestinal phosphatase, using routine procedures known in the art. The DNA is then isolated from a 1% agarose gel using a commercially available kit (“Geneclean” BIO 101 Inc., La Jolla, Calif.).

[0895] The fragment and the dephosphorylated plasmid are ligated together with T4 DNA ligase. E. coli HB101 or other suitable E. coli hosts such as XL-1 Blue (Stratagene Cloning Systems, La Jolla, Calif.) cells are transformed with the ligation mixture and spread on culture plates. Bacteria containing the plasmid are identified by digesting DNA from individual colonies and analyzing the digestion product by gel electrophoresis. The sequence of the cloned fragment is confirmed by DNA sequencing.

[0896] Five μg of a plasmid containing the polynucleotide is co-transfected with 1.0 μg of a commercially available linearized baculovirus DNA (“BaculoGold™ baculovirus DNA”, Pharmingen, San Diego, Calif.), using the lipofection method described by Felgner et al., Proc. Natl. Acad. Sci. USA 84:7413-7417 (1987). One μg of BaculoGold™ virus DNA and 5 μg of the plasmid are mixed in a sterile well of a microtiter plate containing 50 μl of serum-free Grace's medium (Life Technologies Inc., Gaithersburg, Md.). Afterwards, 10 μl Lipofectin plus 90 μl Grace's medium are added, mixed and incubated for 15 minutes at room temperature. Then the transfection mixture is added drop-wise to Sf9 insect cells (ATCC CRL 1711) seeded in a 35 mm tissue culture plate with 1 ml Grace's medium without serum. The plate is then incubated for 5 hours at 27° C. The transfection solution is then removed from the plate and 1 ml of Grace's insect medium supplemented with 10% fetal calf serum is added. Cultivation is then continued at 27° C. for four days.

[0897] After four days the supernatant is collected and a plaque assay is performed, as described by Summers and Smith, supra. An agarose gel with “Blue Gal” (Life Technologies Inc., Gaithersburg) is used to allow easy identification and isolation of gal-expressing clones, which produce blue-stained plaques. (A detailed description of a “plaque assay” of this type can also be found in the user's guide for insect cell culture and baculovirology distributed by Life Technologies Inc., Gaithersburg, page 9-10.) After appropriate incubation, blue stained plaques are picked with the tip of a micropipettor (e.g., Eppendorf). The agar containing the recombinant viruses is then resuspended in a microcentrifuge tube containing 200 μl of Grace's medium and the suspension containing the recombinant baculovirus is used to infect Sf9 cells seeded in 35 mm dishes. Four days later the supernatants of these culture dishes are harvested and then they are stored at 4° C.

[0898] To verify the expression of the polypeptide, Sf9 cells are grown in Grace's medium supplemented with 10% heat-inactivated FBS. The cells are infected with the recombinant baculovirus containing the polynucleotide at a multiplicity of infection (“MOI”) of about 2. If radiolabeled proteins are desired, 6 hours later the medium is removed and is replaced with SF900 II medium minus methionine and cysteine (available from Life Technologies Inc., Rockville, Md.). After 42 hours, 5 μCi of ³⁵S-methionine and 5 μCi ³⁵s-cysteine (available from Amersham) are added. The cells are further incubated for 16 hours and then are harvested by centrifugation. The proteins in the supernatant as well as the intracellular proteins are analyzed by SDS-PAGE followed by autoradiography (if radiolabeled).

[0899] Microsequencing of the amino acid sequence of the amino terminus of purified protein may be used to determine the amino terminal sequence of the produced protein.

### Example 8

### Expression of a Polypeptide in Mammalian Cells

[0900] The polypeptide of the present invention can be expressed in a mammalian cell. A typical mammalian expression vector contains a promoter element, which mediates the initiation of transcription of mRNA, a protein coding sequence, and signals required for the termination of transcription and polyadenylation of the transcript. Additional elements include enhancers, Kozak sequences and intervening sequences flanked by donor and acceptor sites for RNA splicing. Highly efficient transcription is achieved with the early and late promoters from SV40, the long terminal repeats (LTRs) from Retroviruses, e.g., RSV, HTLVI, HIVI and the early promoter of the cytomegalovirus (CMV). However, cellular elements can also be used (e.g., the human actin promoter).

[0901] Suitable expression vectors for use in practicing the present invention include, for example, vectors such as pSVL and pMSG (Pharmacia, Uppsala, Sweden), pRSVcat (ATCC 37152), pSV2dhfr (ATCC 37146), pBC12MI (ATCC 67109), pCMVSport 2.0, and pCMVSport 3.0. Mammalian host cells that could be used include, human Hela, 293, H9 and Jurkat cells, mouse NIH3T3 and C127 cells, Cos 1, Cos 7 and CV1, quail QC1-3 cells, mouse L cells and Chinese hamster ovary (CHO) cells.

[0902] Alternatively, the polypeptide can be expressed in stable cell lines containing the polynucleotide integrated into a chromosome. The co-transfection with a selectable marker such as DHFR, gpt, neomycin, or hygromycin allows the identification and isolation of the transfected cells.

[0903] The transfected gene can also be amplified to express large amounts of the encoded protein. The DHFR (dihydrofolate reductase) marker is useful in developing cell lines that carry several hundred or even several thousand copies of the gene of interest. (See, e.g., Alt, F. W., et al., J. Biol. Chem. 253:1357-1370 (1978); Hamlin, J. L. and Ma, C., Biochem. et Biophys. Acta, 1097:107-143 (1990); Page, M. J. and Sydenham, M. A., Biotechnology 9:64-68 (1991).) Another useful selection marker is the enzyme glutamine synthase (GS) (Murphy et al., Biochem J. 227:277-279 (1991); Bebbington et al., Bio/Technology 10:169-175 (1992). Using these markers, the mammalian cells are grown in selective medium and the cells with the highest resistance are selected. These cell lines contain the amplified-gene(s) integrated into a chromosome. Chinese hamster ovary (CHO) and NSO cells are often used for the production of proteins.

[0904] Derivatives of the plasmid pSV2-dhfr (ATCC Accession No. 37146), the expression vectors pC4 (ATCC Accession No. 209646) and pC6 (ATCC Accession No.209647) contain the strong promoter (LTR) of the Rous Sarco na Virus (Cullen et al., Molecular and Cellular Biology, 438447 (March, 1985)) plus a fragment of the CMV-enhancer (Boshart et al., Cell 41:521-530 (1985).) Multiple cloning sites, e.g., with the restriction enzyme cleavage sites BamHI, XbaI and Asp718, facilitate the cloning of the gene of interest. The vectors also contain the 3′ intron, the polyadenylation and termination signal of the rat preproinsulin gene, and the mouse DHFR gene under control of the SV40 early promoter.

[0905] Specifically, the plasmid pC6, for example, is digested with appropriate restriction enzymes and then dephosphorylated using calf intestinal phosphates by procedures known in the art. The vector is then isolated from a 1% agarose gel.

[0906] A polynucleotide of the present invention is amplified according to the protocol outlined in Example 1. If a naturally occurring signal sequence is used to produce the polypeptide of the present invention, the vector does not need a second signal peptide. Alternatively, if a naturally occurring signal sequence is not used, the vector can be modified to include a heterologous signal sequence. (See, e.g., International Publication No. WO 96/34891.)

[0907] The amplified fragment is isolated from a 1% agarose gel using a commercially available kit (“Geneclean,” BIO 101 Inc., La Jolla, Calif.). The fragment then is digested with appropriate restriction enzymes and again purified on a 1% agarose gel.

[0908] The amplified fragment is then digested with the same restriction enzyme and purified on a 1% agarose gel. The isolated fragment and the dephosphorylated vector are then ligated with T4 DNA ligase. E. coli HB101 or XL-1 Blue cells are then transformed and bacteria are identified that contain the fragment inserted into plasmid pC6 using, for instance, restriction enzyme analysis.

[0909] Chinese hamster ovary cells lacking an active DHFR gene is used for transfection. Five μg of the expression plasmid pC6 or pC4 is cotransfected with 0.5 μg of the plasmid pSVneo using lipofectin (Felgner et al., stipra). The plasmid pSV2-neo contains a dominant selectable marker, the neo gene from Tn5 encoding an enzyme that confers resistance to a group of antibiotics including G418. The cells are seeded in alpha minus MEM supplemented with 1 mg/ml G418. After 2 days, the cells are trypsinized and seeded in hybridoma cloning plates (Greiner, Germany) in alpha minus MEM supplemented with 10, 25, or 50 ng/ml of methotrexate plus 1 mg/ml G418. After about 10-14 days single clones are trypsinized and then seeded in 6-well petri dishes or 10 ml flasks using different concentrations of methotrexate (50 nM, 100 nM, 200 nM, 400 nM, 800 nM). Clones growing at the highest concentrations of methotrexate are then transferred -to new 6-well plates containing even higher concentrations of methotrexate (1, μM, 2 μM, 5 FM, 10 mM, 20 mM).

[0910] The same procedure is repeated until clones are obtained which grow at a concentration of 100-200 μM. Expression of the desired gene product is analyzed, for instance, by SDS-PAGE and Western blot or by reversed phase HPLC analysis.

### Example 9

### Protein Fusions

[0911] The polypeptides of the present. invention are preferably fused to other proteins. These fusion proteins can be used for a variety of applications. For example, fusion of the present polypeptides to His-tag, HA-tag, protein A, IgG domains, and maltose binding protein facilitates purification. (See Example 5; see also EP A 394,827; Traunecker, et al., Nature 331:84-86 (1988).) Similarly, fusion to IgG-1, IgG-3, and albumin increases the halflife time in vivo. Nuclear localization signals fused to the polypeptides of the present invention can target the protein to a specific subcellular localization, while covalent heterodimer or homodimers can increase or decrease the activity of a fusion protein. Fusion proteins can also create chimeric molecules having more than one function. Finally, fusion proteins can increase solubility and/or stability of the fused protein compared to the non-fused protein. All of the types of fusion proteins described above can be made by modifying the following protocol, which outlines the fusion of a polypeptide to an IgG molecule, or the protocol described in Example 5.

[0912] Briefly, the human Fc portion of the IgG molecule can be PCR amplified, using primers that span the 5′ and 3′ ends of the sequence described below. These primers also should have convenient restriction enzyme sites that will facilitate cloning into an expression vector, preferably a mammalian expression vector.

[0913] For example, if pC4 (ATCC Accession No. 209646) is used, the human Fc portion can be ligated into the BamHI cloning site. Note that the 3′ BamHI site should be destroyed. Next, the vector containing the human Fc portion is re-restricted with BamHI, linearizing the vector, and a polynucleotide of the present invention, isolated by the PCR protocol described in Example 1, is ligated into this BamHI site. Note that the polynucleotide is cloned without a stop codon, otherwise a fusion protein will not be produced.

[0914] If the naturally occurring signal sequence is used to produce the polypeptide of the present invention, pC4 does not need a second signal peptide. Alternatively, if the naturally occurring signal sequence is not used, the vector can be modified to include a heterologous signal sequence. (See, e.g., International Publication No. WO 96/34891.)

[0915] Human IgG Fc region:

| | |
|---|---|
| GGGATCCGGAGCCCAAATCTTCTGACAAAACTCACAC | (SEQ ID NO:1) |
| ATGCCCACCGTGCCCAGCACCTGAATTCGAGGGTGCA | |
| CCGTCAGTCTTCCTCTTCCCCCCAAAACCCAAGGACA | |
| CCCTCATGATCTCCCGGACTCCTGAGGTCACATGCGT | |
| GGTGGTGGACGTAAGCCACGAAGACCCTGAGGTCAAG | |
| TTCAACTGGTACGTGGACGGCGTGGAGGTGCATAATG | |
| CCAAGACAAAGCCGCGGGAGGAGCAGTACAACAGCAC | |
| GTACCGTGTGGTCAGCGTCCTCACCGTCCTGCACCAG | |
| GACTGGCTGAATGGCAAGGAGTACAAGTGCAAGGTCT | |
| CCAACAAAGCCCTCCCAACCCCCATCGAGAAAACCAT | |
| CTCCAAAGCCAAAGGGCAGCCCCGAGAACCACAGGTG | |
| TACACCCTGCCCCCATCCCGGGATGAGCTGACCAAGA | |
| ACCAGGTCAGCCTGACCTGCCTGGTCAAAGGCTTCTA | |
| TCCAAGCGACATCGCCGTGGAGTGGGAGAGCAATGGG | |
| CAGCCGGAGAACAACTACAAGACCACGCCTCCCGTGC | |
| TGGACTCCGACGGCTCCTTCTTCCTCTACAGCAAGCT | |
| CACCGTGGACAAGAGCAGGTGGCAGCAGGGGAACGTC | |
| TTCTCATGCTCCGTGATGCATGAGGCTCTGCACAACC | |
| ACTACACGCAGAAGAGCCTCTCCCTGTCTCCGGGTAA | |
| ATGAGTGCGACGGCCGCGACTCTAGAGGAT | |

### Example 10

### Production of an Antibody from a Polypeptide

### Hybridoma Technology

[0916] The antibodies of the present invention can be prepared by a variety of methods. (See, Current Protocols, Chapter 2.) As one example of such methods, cells expressing polypeptide of the present invention are administered to an animal to induce the production of sera containing polyclonal antibodies. In a preferred method, a preparation of polypeptide of the present invention is prepared and purified to render it substantially free of natural contaminants. Such a preparation is then introduced into an animal in order to produce polyclonal antisera of greater specific, activity.

[0917] Monoclonal antibodies specific for polypeptide of the present invention are prepared using hybridoma technology (Kohler et al., Nature 256:495 (1975); Kohler et al., Eur. J. Immunol. 6:511 (1976); Kohler et al., Eur. J. Immunol. 6:292 (1976); Hammerling et al., in: Monoclonal Antibodies and T-Cell Hybridomas, Elsevier, N.Y., pp. 563-681 (1981)). In general, an animal (preferably a mouse) is immunized with polypeptide of the present invention or, more preferably, with a secreted polypeptide of the present invention-expressing cell. Such polypeptide-expressing cells are cultured in any suitable tissue culture medium, preferably in Earle's modified Eagle's medium supplemented with 10% fetal bovine serum (inactivated at about 56° C.), and supplemented with about 10 g/l of nonessential amino acids, about 1,000 U/ml of penicillin, and about 100 μg/ml of streptomycin.

[0918] The splenocytes of such mice are extracted and fused with a suitable myeloma cell line. Any suitable myeloma cell line may be employed in accordance with the present invention; however, it is preferable to employ the parent myeloma cell line (SP2O), available from the ATCC. After fusion, the resulting hybridoma cells are selectively maintained in HAT medium, and then cloned by limiting dilution as described by Wands et al. (Gastroenterology 80:225-232 (1981)). The hybridoma cells obtained through such a selection are then assayed to identify clones which secrete antibodies capable of binding the polypeptide of the present invention.

[0919] Alternatively, additional antibodies capable of binding to polypeptide of the present invention can be produced in a two-step procedure using anti-idiotypic antibodies. Such a method makes use of the fact that antibodies are themselves antigens, and therefore, it is possible to obtain an antibody which binds to a second antibody. In accordance with this method, protein specific antibodies are used to immunize an animal, preferably a mouse. The splenocytes of such an animal are then used to produce hybridoma cells, and the hybridoma cells are screened to identify clones which produce an antibody whose ability to bind to the polypeptide of the present invention-specific antibody can be blocked by polypeptide of the present invention. Such antibodies comprise anti-idiotypic antibodies to the polypeptide of the present invention-specific antibody and are used to immunize an animal to induce formation of further polypeptide of the present invention-specific antibodies.

[0920] For in vivo use of antibodies in humans, an antibody is “humanized”. Such antibodies can be produced using genetic constructs derived from hybridoma cells producing the monoclonal antibodies described above. Methods for producing chimeric and humanized antibodies are known in the art and are discussed herein. (See, for review, Morrison, Science 229:1202 (1985); Oi et al., BioTechniques 4:214 (1986); Cabilly et al., U.S. Pat. No. 4,816,567; Taniguchi et al., EP 171496; Morrison et al., EP 173494; Neuberger et al., WO 8601533; Robinson et al., International Publication No. WO 8702671; Boulianne et al., Nature 312:643 (1984); Neuberger et al., Nature 314:268 (1985).)

### Isolation of Antibody Fragments Directed Against Polypeptide of the Present Invention from A Library of scFvs

[0921] Naturally occurring V-genes isolated from human PBLs are constructed into a library of antibody fragments which contain reactivities against polypeptide of the present invention to which the donor may or may not have been exposed (see e.g., U.S. Pat. No. 5,885,793 incorporated herein by reference in its entirety).

[0922] Rescue of the Library. A library of scFvs is constructed from the RNA of human PBLs as described in International Publication No. WO 92/01047. To rescue phage displaying antibody fragments, approximately 10⁹ E. coli harboring the phagemid are used to inoculate 50 ml of 2×TY containing 1% glucose and 100 μg/ml of ampicillin (2×TY-AMP-GLU) and grown to an O.D. of 0.8 with shaking. Five ml of this culture is used to inoculate 50 ml of 2×TY-AMP-GLU, 2×108 TU of delta gene 3 helper (M13 delta gene III, see International Publication No. WO 92/01047) are added and the culture incubated at 37° C. for 45 minutes without shaking and then at 37° C. for 45 minutes with shaking. The culture is centrifuged at 4000 r.p.m. for 10 min. and the pellet resuspended in 2 liters of 2×TY containing 100 μg/ml ampicillin and 50 ug/ml kanamycin and grown overnight. Phage are prepared as described in International Application No. WO 92/01047.

[0923] M13 delta gene III is prepared as follows: M13 delta gene III helper phage does not encode gene III protein, hence the phage(mid) displaying antibody fragments have a greater avidity of binding to antigen. Infectious M13 delta gene III particles are made by growing the helper phage in cells harboring a pUC19 derivative supplying the wild type gene III protein during phage morphogenesis. The culture is incubated for I hour at 37° C. without shaking and then for a further hour at 37° C. with shaking. Cells are spun down (IEC-Centra 8,400 r.p.m. for 10 min), resuspended in 300 ml 2×TY broth containing 100 μg ampicillin/ml and 25 μg kanamycin/ml (2×TY-AMP-KAN) and grown overnight, shaking at 37° C. Phage particles are purified and concentrated from the culture medium by two PEG-precipitations (Sambrook et al., 1990), resuspended in 2 ml PBS and passed through a 0.45 μm filter (Minisart NML; Sartorius) to give a final concentration of approximately 10¹³ transducing units/ml (ampicillin-resistant clones).

[0924] Panning of the Library. Immunotubes (Nunc) are coated overnight in PBS with 4 ml of either 100 μg/ml or 10 μg/ml of a polypeptide of the present invention. Tubes are blocked with 2% Marvel-PBS for 2 hours at 37° C. and then washed 3 times in PBS. Approximately 10¹³ TU of phage is applied to the tube and incubated for 30 minutes at room temperature tumbling on an over and under turntable and then left to stand for another 1.5 hours. Tubes are washed 10 times with PBS 0.1% Tween-20 and 10 times with PBS. Phage are eluted by adding 1 ml of 100 mM triethylamine and rotating 15 minutes on an under and over turntable after which the solution is immediately neutralized with 0.5 ml of 1.0M Tris-HCl, pH 7.4. Phage are then used to infect 10 ml of mid-log E. coli TG1 by incubating eluted phage with bacteria for 30 minutes at 37° C. The E. coli are then plated on TYE plates containing 1% glucose and 100 μg/ml ampicillin. The resulting bacterial library is then rescued with delta gene 3 helper phage as described above to prepare phage for a subsequent round of selection. This process is then repeated for a total of 4 rounds of affinity purification with tube-washing increased to 20 times with PBS, 0.1% Tween-20 and 20 times with PBS for rounds 3 and 4.

[0925] Characterization of Binders. Eluted phage from the 3rd and 4th rounds of selection are used to infect E. coli HB 2151 and soluble scFv is produced (Marks, et al., 1991) from single colonies for assay. ELISAs are performed with microtitre plates coated with 10 pg/ml of the polypeptide of the present invention in 50 mM bicarbonate pH 9.6. Clones positive in ELISA are further characterized by PCR fingerprinting (see, e.g., International Application No. WO 92/01047) and then by sequencing. These ELISA positive clones may also be further characterized by techniques known in the art, such as, for example, epitope mapping, binding affinity, receptor signal transduction, ability to block or competitively -inhibit antibody/antigen binding, and competitive agonistic or antagonistic activity.

### Example 11

### Method of Determining Alterations in a Gene Corresponding to a Polynucleotide

[0926] RNA isolated from entire families or individual patients presenting with a phenotype of interest (such as a disease) is isolated. cDNA is then generated from these RNA samples using protocols known in the art. (See, Sambrook.) The cDNA is then used as a template for PCR, employing primers surrounding regions of interest in SEQ ID NO:X; and/or the nucleotide sequence of the cDNA contained in Clone ID NO:Z. Suggested PCR conditions consist of 35 cycles at 95 degrees C. for 30 seconds; 60-120 seconds at 52-58 degrees C; and 60-120 seconds at 70 degrees C., using buffer solutions described in Sidransky et al., Science 252:706 (1991).

[0927] PCR products are then sequenced using primers labeled at their 5′ end with T4 polynucleotide kinase, employing SequiTherm Polymerase (Epicentre Technologies). The intron-exon boundaries of selected exons is also determined and genomic PCR products analyzed to confirm the results. PCR products harboring suspected mutations are then cloned and sequenced to validate the results of the direct sequencing.

[0928] PCR products are cloned into T-tailed vectors as described in Holton et al., Nucleic Acids Research, 19:1156 (1991) and sequenced with T7 polymerase (United States Biochemical). Affected individuals are identified by mutations not present in unaffected individuals.

[0929] Genomic rearrangements are also observed as a method of determining alterations in a gene corresponding to a polynucleotide. Genomic clones isolated according to Example 2 are nick-translated with digoxigenindeoxy-uridine 5′-triphosphate (Boehringer Manheim), and FISH performed as described in Johnson et al., Methods Cell Biol. 35:73-99 (1991). Hybridization with the labeled probe is carried out using a vast excess of human cot-1 DNA for specific hybridization to the corresponding genomic locus.

[0930] Chromosomes are counterstained with 4,6-diamino-2-phenylidole and propidium iodide, producing a combination of C- and R-bands. Aligned images for precise mapping are obtained using a triple-band filter set (Chroma Technology, Brattleboro, Vt.) in combination with a cooled charge-coupled device camera (Photometrics, Tucson, Ariz.) and variable excitation wavelength filters. (Johnson et al., Genet. Anal. Tech. Appl., 8:75 (1991).) Image collection, analysis and chromosomal fractional length measurements are performed using the ISee Graphical Program System. (Inovision Corporation, Durham, N.C.) Chromosome alterations of the genomic-region hybridized by the probe are identified as insertions, deletions, and translocations. These alterations are used as a diagnostic marker for an associated disease.

### Example 12

### Method of Detecting Abnormal Levels of a Polypeptide in a Biological Sample

[0931] A polypeptide of the present invention can be detected in a biological sample, and if an increased or decreased level of the polypeptide is detected, this polypeptide is a marker for a particular phenotype. Methods of detection are numerous, and thus, it is understood that one skilled in the art can modify the following assay to fit their particular needs.

[0932] For example, antibody-sandwich ELISAs are used to detect polypeptides in a sample, preferably a biological sample. Wells of a microtiter plate are coated with specific antibodies, at a final concentration of 0.2 to 10 ug/ml. The antibodies are either monoclonal or polyclonal and are produced by the method described in Example 10. The wells are blocked so that non-specific binding of the polypeptide to the well is reduced.

[0933] The coated wells are then incubated for >2 hours at RT with a sample containing the polypeptide. Preferably, serial dilutions of the sample should be used to validate results. The plates are then washed three times with deionized or distilled water to remove unbound polypeptide.

[0934] Next, 50 ul of specific antibody-alkaline phosphatase conjugate, at a concentration of 25-400 ng, is added and incubated for 2 hours at room temperature. The plates are again washed three times with deionized or distilled water to remove unbound conjugate.

[0935] Add 75 ul of 4-methylumbelliferyl phosphate (MUP) or p-nitrophenyl phosphate (NPP) substrate solution to each well and incubate 1 hour at room temperature. Measure the reaction by a microtiter plate reader. Prepare a standard curve, using serial dilutions of a control sample, and plot polypeptide concentration on the X-axis (log scale) and fluorescence or absorbance of the Y-axis (linear scale). Interpolate the concentration of the polypeptide in the sample using the standard curve.

### Example 13

### Formulation

[0936] The invention also provides methods of treatment and/or prevention of diseases or disorders (such as, for example, any one or more of the diseases or disorders disclosed herein) by administration to a subject of an effective amount of a Therapeutic. By therapeutic is meant polynucleotides or polypeptides of the invention (including fragments and variants), agonists or antagonists thereof, and/or antibodies thereto, in combination with a pharmaceutically acceptable carrier type (e.g., a sterile carrier).

[0937] The Therapeutic will be formulated and dosed in a fashion consistent with good medical practice, taking into account the clinical condition of the individual patient (especially the side effects of treatment with the Therapeutic alone), the site of delivery, the method of administration, the scheduling of administration, and other factors known to practitioners. The “effective amount” for purposes herein is thus determined by such considerations.

[0938] As a general proposition, the total pharmaceutically effective amount of the Therapeutic administered parenterally per dose will be in the range of about 1 ug/kg/day to 10 mg/kg/day of patient body weight, although, as noted above, this will be subject to therapeutic discretion. More preferably, this dose is at least 0.01 mg/kg/day, and most preferably for humans between about 0.01 and 1 mg/kg/day for the hormone. If given continuously, the Therapeutic is typically administered at a dose rate of about 1 ug/kg/hour to about 50 ug/kg/hour, either by 1-4 injections per day or by continuous subcutaneous infusions, for example, using a mini-pump. An intravenous bag solution may also be employed. The length of treatment needed to observe changes and the interval following treatment for responses to occur appears to vary depending on the desired effect.

[0939] Therapeutics can be are administered orally, rectally, parenterally, intracistemally, intravaginally, intraperitoneally, topically (as by powders, ointments, gels, drops or transdermal patch), bucally, or as an oral or nasal spray. “Pharmaceutically acceptable carrier” refers to a non-toxic solid, semisolid or liquid filler, diluent, encapsulating material or formulation auxiliary of any. The term “parenteral” as used herein refers to modes of administration which include intravenous, intramuscular, intraperitoneal, intrasternal, subcutaneous and intraarticular injection and infusion.

[0940] Therapeutics of the invention are also suitably administered by sustained-release systems. Suitable examples of sustained-release Therapeutics are administered orally, rectally, parenterally, intracistemally, intravaginally, intraperitoneally, topically (as by powders, ointments, gels, drops or transdermal patch), bucally, or as an oral or nasal spray. “Pharmaceutically acceptable carrier” refers to a non-toxic solid, semisolid or liquid filler, diluent, encapsulating material or formulation auxiliary of any type. The term “parenteral” as used herein refers to modes of administration which include intravenous, intramuscular, intraperitoneal, intrasternal, subcutaneous and intraarticular injection and infusion.

[0941] Therapeutics of the invention are also suitably administered by sustained-release systems. Suitable examples of sustained-release Therapeutics include suitable polymeric materials (such as, for example, semi-permeable polymer matrices in the form of shaped articles, e.g., films, or mirocapsules), suitable hydrophobic materials (for example as an emulsion in an acceptable oil) or ion exchange resins, and sparingly soluble derivatives (such as, for example, a sparingly soluble salt).

[0942] Sustained-release matrices include polylactides (U.S. Pat. No. 3,773,919, EP 58,481), copolymers of L-glutamic acid and gamma-ethyl-L-glutamate (Sidman et al., Biopolymers 22:547-556 (1983)), poly (2-hydroxyethyl methacrylate) (Langer et al., J. Biomed. Mater. Res. 15:167-277 (1981), and Langer, Chem. Tech. 12:98-105 (1982)), ethylene vinyl acetate (Langer et al., Id.) or poly-D-(−)-3-hydroxybutyric acid (EP 133,988).

[0943] Sustained-release Therapeutics also include liposomally entrapped Therapeutics of the invention (see generally, Langer, Science 249:1527-1533 (1990); Treat et al., in Liposomes in the Therapy of Infectious Disease and Cancer, Lopez-Berestein and Fidler (eds.), Liss, N. Y., pp. 317-327 and 353-365 (1989)). Liposomes containing the Therapeutic are prepared by methods known per se: DE 3,218,121; Epstein et al., Proc. Natl. Acad. Sci. (USA) 82:3688-3692 (1985); Hwang et al., Proc. Natl. Acad. Sci.(USA) 77:4030-4034 (1980); EP 52,322; EP 36,676; EP 88,046; EP 143,949; EP 142,641; Japanese Pat. Appl. 83-118008; U.S. Pat. Nos. 4,485,045 and 4,544,545; and EP 102,324. Ordinarily, the liposomes are of the small (about 200-800 Angstroms) unilamellar type in which the lipid content is greater than about 30 mol. percent cholesterol, the selected proportion being adjusted for the optimal Therapeutic.

[0944] In yet an additional embodiment, the Therapeutics of the invention are delivered by way of a pump (see Langer, supra; Sefton, CRC Crit. Ref. Biomed. Eng. 14:201 (1987); Buchwald et al., Surgery 88:507 (1980); Saudek et al., N. Engl. J. Med. 321:574 (1989)).

[0945] Other controlled release systems are discussed in the review by Langer (Science 249:1527-1533 (1990)).

[0946] For parenteral administration, in one embodiment, the Therapeutic is formulated generally by mixing it at the desired degree of purity, in a unit dosage injectable form (solution, suspension, or emulsion), with a pharmaceutically acceptable carrier, i.e., one that is non-toxic to recipients at the dosages and concentrations employed and is compatible with other ingredients of the formulation. For example, the formulation preferably does not include oxidizing agents and other compounds that are known to be deleterious to the Therapeutic.

[0947] Generally, the formulations are prepared by contacting the Therapeutic uniformly and intimately with liquid carriers or finely divided solid carriers or both. Then, if necessary, the product is shaped into the desired formulation. Preferably the carrier is a parenteral carrier, more preferably a solution that is isotonic with the blood of the recipient. Examples of such carrier vehicles include water, saline, Ringer's solution, and dextrose solution. Non-aqueous vehicles such as fixed oils and ethyl oleate are also useful herein, as well as liposomes.

[0948] The carrier suitably contains minor amounts of additives such as substances that enhance isotonicity and chemical stability. Such materials are non-toxic to recipients at the dosages and concentrations employed, and include buffers such as phosphate, citrate, succinate, acetic acid, and other organic acids or their salts; antioxidants such as ascorbic acid; low molecular weight (less than about ten residues) polypeptides, e.g., polyarginine or tripeptides; proteins, such as serum albumin, gelatin, or immunoglobulins; hydrophilic polymers such as polyvinylpyrrolidone; amino acids, such as glycine, glutamic acid, aspartic acid, or arginine; monosaccharides, disaccharides, and other carbohydrates including cellulose or its derivatives, glucose, manose, or dextrins; chelating agents such as EDTA; sugar alcohols such as mannitol or sorbitol; counterions such as sodium; and/or nonionic surfactants such as polysorbates, poloxamers, or PEG.

[0949] The Therapeutic is typically formulated in such vehicles at a concentration of about 0.1 mg/ml to 100 mg/ml, preferably 1-10 mg/ml, at a pH of about 3 to 8. It will be understood that the use of certain of the foregoing excipients, carriers, or stabilizers will result in the formation of polypeptide salts.

[0950] Any pharmaceutical used for therapeutic administration can be sterile. Sterility is readily accomplished by filtration through sterile filtration membranes (e.g., 0.2 micron membranes). Therapeutics generally are placed into a container having a sterile access port, for example, an intravenous solution bag or vial having a stopper pierceable by a hypodermic injection needle.

[0951] Therapeutics ordinarily will be stored in unit or multi-dose containers, for example, sealed ampoules or vials, as an aqueous solution or as a lyophilized formulation for reconstitution. As an example of a lyophilized formulation, 10-ml vials are filled with 5 ml of sterile-filtered 1% (w/v) aqueous Therapeutic solution, and the resulting mixture is lyophilized. The infusion solution is prepared by reconstituting the lyophilized Therapeutic using bacteriostatic Water-for-Injection.

[0952] The invention also provides a pharmaceutical pack or kit comprising one or more containers filled with one or more of the ingredients of the Therapeutics of the invention. Associated with such container(s) can be a notice in the form prescribed by a governmental agency regulating the manufacture, use or sale of pharmaceuticals or biological products, which notice reflects approval by the agency of manufacture, use or sale for human administration. In addition, the Therapeutics may be employed in conjunction with other therapeutic compounds.

[0953] The Therapeutics of the invention may be administered alone or in combination with adjuvants. Adjuvants that may be administered with the Therapeutics of the invention include, but are not limited to, alum, alum plus deoxycholate (ImmunoAg), MTP-PE (Biocine Corp.), QS21 (Genentech, Inc.), BCG (e.g., THERACYSO®), MPL and nonviable prepartions of Corynebacterium parvum. In a specific embodiment, Therapeutics of the invention are administered in combination with alum. In another specific embodiment, Therapeutics of the invention are administered in combination with QS-21. Further adjuvants that may be administered with the Therapeutics of the invention include, but are not limited to, Monophosphoryl lipid immunomodulator, AdjuVax 100a, QS-21, QS-18, CRL1005, Aluminum salts, MF-59, and Virosomal adjuvant technology. Vaccines that may be administered with the Therapeutics of the invention include, but are not limited to, vaccines directed toward protection against MMR (measles, mumps, rubella), polio, varicella, tetanus/diptheria, hepatitis A, hepatitis B, haemophilus influenzae B, whooping cough, pneumonia, influenza, Lyme's Disease, rotavirus, cholera, yellow fever, Japanese encephalitis, poliomyelitis, rabies, typhoid fever, and pertussis. Combinations may be administered either concomitantly, e.g., as an admixture, separately but simultaneously or concurrently; or sequentially. This includes presentations in which the combined agents are administered together as a therapeutic mixture, and also procedures in which the combined agents are administered separately but simultaneously, e.g., as through separate intravenous lines into the same individual. Administration “in combination”further includes the separate administration of one of the compounds or agents given first, followed by the second.

[0954] The Therapeutics of the invention may be administered alone or in combination with other therapeutic agents. Therapeutic agents that may be administered in combination with the Therapeutics of the invention, include but not limited to, chemotherapeutic agents, antibiotics, steroidal and non-steroidal anti-inflammatories, conventional immunotherapeutic agents, and/or therapeutic treatments described below. Combinations may be administered either concomitantly, e.g., as an admixture, separately but simultaneously or concurrently; or sequentially. This includes presentations in which the combined agents are administered together as a therapeutic mixture, and also procedures in which the combined agents are administered separately but simultaneously, e.g., as through separate intravenous lines into the same individual. Administration “in combination”further includes the separate administration of one of the compounds or agents given first, followed by the second.

[0955] In certain embodiments, Therapeutics of the invention are administered in combination with antiretroviral agents, nucleoside/nucleotide reverse transcriptase inhibitors (NRTIs), non-nucleoside reverse transcriptase inhibitors (NNRTIs), and/or protease inhibitors (PIs). NRTIs that may be administered in combination with the Therapeutics of the invention, include, but are not limited to, RETROVIR™ (zidovudine/AZT), VIDEX™ (didanosine/ddI), HIVID™ (zalcitabine/ddC), ZERIT™ (stavudine/d4T), EPIVIR™ (lamivudine/3TC), and COMBIVIR™ (zidovudine/lamivudine). NNRTIs that may be administered in combination with the Therapeutics of the invention, include, but are not limited to, VIRAMUNE™ (nevirapine), RESCRIPTOR™ (delavirdine), and SUSTIVA™ (efavirenz). Protease inhibitors that may be administered in combination with the Therapeutics of the invention, include, but are not limited to, CRIXIVAN™ (indinavir), NORVIR™ (ritonavir), INVIRASE™ (saquinavir), and VIRACEPT™ (nelfinavir). In a specific embodiment, antiretroviral agents, nucleoside reverse transcriptase inhibitors, non-nucleoside reverse transcriptase inhibitors, and/or protease inhibitors may be used in any combination with Therapeutics of the invention to treat AIDS and/or to prevent or treat HIV infection.

[0956] Additional NRTIs include LODENOSINE™ (F-ddA; an acid-stable adenosine NRTI; Triangle/Abbott; COVIRACIL™ (emtricitabine/FTC; structurally related to lamivudine (3TC) but with 3- to 10-fold greater activity in vitro; Triangle/Abbott); dOTC (BCH-10652, also structurally related to lamivudine-but retains activity against a substantial proportion of lamivudine-resistant isolates; Biochem Pharma); Adefovir (refused approval for anti-HIV therapy by FDA; Gilead Sciences); PREVEON® (Adefovir Dipivoxil, the active prodrug of adefovir; its active form is PMEA-pp); TENOFOVIR™ (bis-POC PMPA, a PMPA prodrug; Gilead); DAPD/DXG (active metabolite of DAPD; Triangle/Abbott); D-D4FC (related to 3TC, with activity against AZT/3TC-resistant virus); GW420867X (Glaxo Wellcome); ZIAGEN™ (abacavir/159U89; Glaxo Wellcome Inc.); CS-87 (3′azido-2′,3′-dideoxyuridine; WO 99/66936); and S-acyl-2-thioethyl (SATE)-bearing prodrug forms of β-L-FD4C and β-L-FddC (WO 98/17281).

[0957] Additional NNRTIs include COACTINON™ (Emivirine/MKC-442, potent NNRTI of the HEPT class; Triangle/Abbott); CAPRAVIRINE™ (AG-1549/S-1153, a next generation NNRTI with activity against viruses containing the K103N mutation; Agouron); PNU-142721 (has 20- to 50-fold greater activity than its predecessor delavirdine and is active against K103N mutants; Pharmacia & Upjohn); DPC-961 and DPC-963 (second-generation derivatives of efavirenz, designed to be active against viruses with the K103N mutation; DuPont); GW-420867X (has 25-fold greater activity than HBY097 and is active against K103N mutants; Glaxo Wellcome); CALANOLIDE A (naturally occurring agent from the latex tree; active against viruses containing either or both the Y181C and K103N mutations); and Propolis (WO 99/49830).

[0958] Additional protease inhibitors include LOPINAVIR™ (ABT378/r; Abbott Laboratories); BMS-232632 (an azapeptide; Bristol-Myres Squibb); TIPRANAVIR™ (PNU-140690, a non-peptic dihydropyrone; Pharmacia & Upjohn); PD-178390 (a nonpeptidic dihydropyrone; Parke-Davis); BMS 232632 (an azapeptide; Bristol-Myers Squibb); L-756,423 (an indinavir analog; Merck); DMP-450 (a cyclic urea compound; Avid & DuPont); AG-1776 (a peptidomimetic with in vitro activity against protease inhibitor-resistant viruses; Agouron); VX-175/GW-433908 (phosphate prodrug of amprenavir; Vertex & Glaxo Welcome); CGP61755 (Ciba); and AGENERASE™ (amprenavir; Glaxo Wellcome Inc.).

[0959] Additional antiretroviral agents include fusion inhibitors/gp41 binders. Fusion inhibitors/gp41 binders include T-20 (a peptide from residues 643-678 of the HIV gp41 transmembrane protein ectodomain which binds to gp41 in its resting state and prevents transformation to the fusogenic state; Trimeris) and T-1249 (a second-generation fusion inhibitor; Trimeris).

[0960] Additional antiretroviral agents include fusion inhibitors/chemokine receptor antagonists. Fusion inhibitors/chemokine receptor antagonists include CXCR4 antagonists such as AMD 3100 (a bicyclam), SDF-1 and its analogs, and ALX40-4C (a cationic peptide), T22 (an 18 amino acid peptide; Trimeris) and the T22 analogs T134 and T140; CCR5 antagonists such as RANTES (9-68), AOP-RANTES, NNY-RANTES, and TAK-779; and CCR5/CXCR4 antagonists such as NSC 651016(a distamycin analog). Also included are CCR2B, CCR3, and CCR6 antagonists. Chemokine recpetor agonists such as RANTES, SDF-1, MIP-1α, MIP-1β, etc., may also inhibit fusion.

[0961] Additional antiretroviral agents include integrase inhibitors. Integrase inhibitors include dicaffeoylquinic (DFQA) acids; L-chicoric acid (a dicaffeoyltartaric (DCTA) acid); quinalizarin (QLC) and related anthraquinones; ZINTEVIR™ (AR 177, an oligonucleotide that probably acts at cell surface rather than being a true integrase inhibitor; Arondex); and naphthols such as those disclosed in WO 98/50347.

[0962] Additional antiretroviral agents include hydroxyurea-like compunds such as BCX-34 (a purine nucleoside phosphorylase inhibitor; Biocryst); ribonucleotide reductase inhibitors such as DIDOX™ (Molecules for Health); inosine monophosphate dehydrogenase (IMPDH) inhibitors sucha as VX-497 (Vertex); and myvopholic acids such as CellCept (mycophenolate mofetil; Roche).

[0963] Additional antiretroviral agents include inhibitors of viral integrase, inhibitors of viral genome nuclear translocation such as arylene bis(methylketone) compounds; inhibitors of HIV entry such as AOP-RANTES, NNY-RANTES, RANTES-IgG fusion protein, soluble complexes of RANTES and glycosaminoglycans (GAG), and AMD-3100; nucleocapsid zinc finger inhibitors such as dithiane compounds; targets of HIV Tat and Rev; and pharmacoenhancers such as ABT-378.

[0964] Other antiretroviral therapies and adjunct therapies include cytokines and lymphokines such as MIP-1α, MIP-1β, SDF-1α, IL-2, PROLEUKIN™ (aldesleukin/L2-7001; Chiron), IL-4, IL-10, IL-12, and IL-13; interferons such as IFN-α2a; antagonists of TNFs, NFκB, GM-CSF, M-CSF, and IL-10; agents that modulate immune activation such as cyclosporin and prednisone; vaccines such as Remune™ (HIV Immunogen), APL 400-003 (Apollon), recombinant gp120 and fragments, bivalent (B/E) recombinant envelope glycoprotein, rgp120CM235, MN rgp120, SF-2 rgp120, gp120/soluble CD4 complex, Delta JR-FL protein, branched synthetic peptide derived from discontinuous gp120 C3/C4 domain, fusion-competent immunogens, and Gag, Pol, Nef, and Tat vaccines; gene-based therapies such as genetic suppressor elements (GSEs; WO 98/54366), and intrakines (genetically modified CC chemokines targetted to the ER to block surface expression of newly synthesized CCR5 (Yang et al., PNAS 94:11567-72 (1997); Chen et al., Nat. Med. 3:1110-16 (1997)); antibodies such as the anti-CXCR4 antibody 12G5, the anti-CCR5 antibodies 2D7, 5C7, PA8, PA9, PA10, PA11, PA12, and PA14, the anti-CD4 antibodies Q4120 and RPA-T4, the anti-CCR3 antibody 7B11, the anti-gp120 antibodies 17b, 48d, 447-52D, 257-D, 268-D and 50.1, anti-Tat antibodies, anti-TNF-α antibodies, and monoclonal antibody 33A; aryl hydrocarbon (AH) receptor agonists and antagonists such as TCDD, 3,3′,4,4′,5-pentachlorobiphenyl, 3,3′,4,4′-tetrachlorobiphenyl, and α-naphthoflavone (WO 98/30213); and antioxidants such as γ-L-glutamyl-L-cysteine ethyl ester (γ-GCE; WO 99/56764).

[0965] In a further embodiment, the Therapeutics of the invention are administered in combination with an antiviral agent. Antiviral agents that may be administered with the Therapeutics of the invention include, but are not limited to, acyclovir, ribavirin, amantadine, and remantidine.

[0966] In other embodiments, Therapeutics of the invention may be administered in combination with anti-opportunistic infection agents. Anti-opportunistic agents that may be administered in combination with the Therapeutics of the invention, include, but are not limited to, TRIMETHOPRIM-SULFAMETHOXAZOLE™, DAPSONE™, PENTAMIDINE™, ATOVAQUONE™, ISONIAZID™, RIFAMPIN™, PYRAZINAMIDE™, ETHAMBUTOL™, RIFABUTIN™, CLARITHROMYCIN™, AZITHROMYCIN™, GANCICLOVIR™, FOSCARNET™, CIDOFOVIR™, FLUCONAZOLE™, ITRACONAZOLE™, KETOCONAZOLE™, ACYCLOVIR™, FAMCICOLVIR™, PYRIMETHAMINE™, LEUCOVORIN™, NEUPOGEN™(filgrastim/G-CSF), and LEUKINE™ (sargramostim/GM-CSF). In a specific embodiment, Therapeutics of the invention are used in any combination with TRIMETHOPRIM-SULFAMETHOXAZOLE™, DAPSONE™, PENTAMIDINE™, and/or ATOVAQUONE™ to prophylactically treat or prevent an opportunistic Pneumocystis carinii pneumonia infection. In another specific embodiment, Therapeutics of the invention are used in any combination with ISONIAZID™, RIFAMPIN™, PYRAZINAMIDE™, and/or ETHAMBUTOL™ to prophylactically treat or prevent an opportunistic Mycobacterium avium complex infection. In another specific embodiment, Therapeutics of the invention are used in any combination with RIFABUTIN™, CLARITHROMYCIN™, and/or AZITHROMYCIN™ to prophylactically treat or prevent an opportunistic Mycobacterium tuberculosis infection. In another specific embodiment, Therapeutics of the invention are used in any combination with GANCICLOVIR™, FOSCARNET™, and/or CIDOFOVIR™ to prophylactically treat or prevent an opportunistic cytomegalovirus infection. In another specific embodiment, Therapeutics of the invention are used in any combination with FLUCONAZOLE™, ITRACONAZOLE™, and/or KETOCONAZOLE™ to prophylactically treat or prevent an opportunistic fungal infection. In another specific embodiment, Therapeutics of the invention are used in any combination with ACYCLOVIR™ and/or FAMCICOLVIR™ to prophylactically treat or prevent an opportunistic herpes simplex virus type I and/or type II infection. In another specific embodiment, Therapeutics of the invention are used in any combination with PYRIMETHAMINE™ and/or LEUCOVORIN™ to prophylactically treat or prevent an opportunistic Toxoplasma gondii infection. In another specific embodiment, Therapeutics of the invention are used in any combination with LEUCOVORIN™ and/or NEUPOGEN™ to prophylactically treat or prevent an opportunistic bacterial infection.

[0967] In a further embodiment, the Therapeutics of the invention are administered in combination with an antibiotic agent. Antibiotic agents that may be administered with the Therapeutics of the invention include, but are not limited to, amoxicillin, beta-lactamases, aminoglycosides, beta-lactam (glycopeptide), beta-lactamases, Clindamycin, chloramphenicol, cephalosporins, ciprofloxacin, ciprofloxacin, erythromycin, fluoroquinolones, macrolides, metronidazole, penicillins, quinolones, rapamycin, rifampin, streptomycin, sulfonamide, tetracyclines, trimethoprim, trimethoprim-sulfamthoxazole, and vancomycin.

[0968] In other embodiments, Therapeutics of the invention are administered in combination with immunosuppressive agents. Immunosuppressive agents that may be administered in combination with the Therapeutics of the invention include, but are not limited to, steroids, cyclosporine, cyclosporine analogs, cyclophosphamide methylprednisone, prednisone, azathioprine, FK-506, 15-deoxyspergualin, and other immunosuppressive agents that act by suppressing the function of responding T cells. Other immunosuppressive agents that may be administered in combination with the Therapeutics of the invention include, but are not limited to, prednisolone, methotrexate, thalidomide, methoxsalen, rapamycin, leflunomide, mizoribine (BREDININ™), brequinar, deoxyspergualin, and azaspirane (SKF 105685), ORTHOCLONE OKT® 3 (muromonab-CD3), SANDIMMUNE™, NEORAL™, SANGDYA™ (cyclosporine), PROGRAF® (FK506, tacrolimus), CELLCEPT® (mycophenolate motefil, of which the active metabolite is mycophenolic acid), IMURAN™ (azathioprine), glucocorticosteroids, adrenocortical steroids such as DELTASONE™ (prednisone) and HYDELTRASOL™ (prednisolone), FOLEX™ and MEXATE™ (methotrxate), OXSORALEN-ULTRA™ (methoxsalen) and RAPAMUNE™ (sirolimus). In a specific embodiment, immunosuppressants may be used to prevent rejection of organ or bone marrow transplantation.

[0969] In an additional embodiment, Therapeutics of the invention are administered alone or in combination with one or more intravenous immune globulin preparations. Intravenous immune globulin preparations that may be administered with the Therapeutics of the invention include, but not limited to, GAMMAR™, IVEEGAM™, SANDOGLOBULIN™, GAMMAGARD S/D™, ATGAM™ (antithymocyte glubulin), and GAMIMUNE™. In a specific embodiment, Therapeutics of the invention are administered in combination with intravenous immune globulin preparations in transplantation therapy (e.g., bone marrow transplant).

[0970] In certain embodiments, the Therapeutics of the invention are administered alone or in combination with an anti-inflammatory agent. Anti-inflammatory agents that may be administered with the Therapeutics of the invention include, but are not limited to, corticosteroids (e.g. betamethasone, budesonide, cortisone, dexamethasone, hydrocortisone, methylprednisolone, prednisolone, prednisone, and triamcinotone), nonsteroidal anti-inflammatory drugs (e.g., diclofenac, diflunisal, etodolac, fenoprofen, floctafenine, flurbiprofen, ibuprofen, indomethacin, ketoprofen, meclofenamate, mefenamic acid, meloxicam, nabumetone, naproxen, oxaprozin, phenylbutazone, piroxicam, sulindac, tenoxicam, tiaprofenic acid, and tolmetin.), as well as antihistamines, aminoarylcarboxylic acid derivatives, arylacetic acid derivatives, arylbutyric acid derivatives, arylcarboxylic acids, arylpropionic acid derivatives, pyrazoles, pyrazolones, salicylic acid derivatives, thiazinecarboxamides, e-acetamidocaproic acid, S-adenosylmethionine, 3-amino-4-hydroxybutyric acid, amixetrine, bendazac, benzydamine, bucolome, difenpiramide, ditazol, emorfazone, guaiazulene, nabumetone, nimesulide, orgotein, oxaceprol, paranyline, perisoxal, pifoxime, proquazone, proxazole, and tenidap.

[0971] In an additional embodiment, the compositions of the invention are administered alone or in combination with an anti-angiogenic agent. Anti-angiogenic agents that may be administered with the compositions of the invention include, but are not limited to, Angiostatin (Entremed, Rockville, Md.), Troponin-1 (Boston Life Sciences, Boston, Mass.), anti-Invasive Factor, retinoic acid and derivatives thereof, paclitaxel (Taxol), Suramin, Tissue Inhibitor of Metalloproteinase-1, Tissue Inhibitor of Metalloproteinase-2, VEGI, Plasminogen Activator Inhibitor-1, Plasminogen Activator Inhibitor-2, and various forms of the lighter “d group” transition metals.

[0972] Lighter “d group” transition metals include, for example, vanadium, molybdenum, tungsten, titanium, niobium, and tantalum species. Such transition metal species may form transition metal complexes. Suitable complexes of the above-mentioned transition metal species include oxo transition metal complexes.

[0973] Representative examples of vanadium complexes include oxo vanadium complexes such as vanadate and vanadyl complexes. Suitable vanadate complexes include metavanadate and orthovanadate complexes such as, for example, ammonium metavanadate, sodium metavanadate, and sodium orthovanadate. Suitable vanadyl complexes include, for example, vanadyl acetylacetonate and vanadyl sulfate including vanadyl sulfate hydrates such as vanadyl sulfate mono- and trihydrates.

[0974] Representative examples of tungsten and molybdenum complexes also include oxo complexes. Suitable oxo tungsten complexes include tungstate and tungsten oxide complexes. Suitable tungstate complexes include ammonium tungstate, calcium tungstate, sodium tungstate dihydrate, and tungstic acid. Suitable tungsten oxides include tungsten (IV) oxide and tungsten (VI) oxide. Suitable oxo molybdenum complexes include molybdate, molybdenum oxide, and molybdenyl complexes. Suitable molybdate complexes include ammonium molybdate and its hydrates, sodium molybdate and its hydrates, and potassium molybdate and its hydrates. Suitable molybdenum oxides include molybdenum (VI) oxide, molybdenum (VI) oxide, and molybdic acid. Suitable molybdenyl complexes include, for example, molybdenyl acetylacetonate. Other suitable tungsten and molybdenum complexes include hydroxo derivatives derived from, for example, glycerol, tartaric acid, and sugars.

[0975] A wide variety of other anti-angiogenic factors may also be utilized within the context of the present invention. Representative examples include, but are not limited to, platelet factor 4; protamine sulphate; sulphated chitin derivatives (prepared from queen crab shells), (Murata et al., Cancer Res. 51:22-26, (1991)); Sulphated Polysaccharide Peptidoglycan Complex (SP- PG) (the function of this compound may be enhanced by the presence of steroids such as estrogen, and tamoxifen citrate); Staurosporine; modulators of matrix metabolism, including for example, proline analogs, cishydroxyproline, d,L-3,4-dehydroproline, Thiaproline, alpha,alpha-dipyridyl, aminopropionitrile fumarate; 4-propyl-5-(4-pyridinyl)-2(3H)-oxazolone; Methotrexate; Mitoxantrone; Heparin; Interferons; 2 Macroglobulin-serum; ChIMP-3 (Pavloff et al., J. Bio. Chem. 267:17321-17326, (1992)); Chymostatin (Tomkinson et al., Biochem J. 286:475-480, (1992)); Cyclodextrin Tetradecasulfate; Eponemycin; Camptothecin; Fumagillin (Ingber et al., Nature 348:555-557, (1990)); Gold Sodium Thiomalate (“GST”; Matsubara and Ziff, J. Clin. Invest. 79:1440-1446, (1987)); anticollagenase-serum; alpha2-antiplasmin (Holmes et al., J. Biol. Chem. 262(4): 1659-1664, (1987)); Bisantrene (National Cancer Institute); Lobenzarit disodium (N-(2)-carboxyphenyl-4- chloroanthronilic acid disodium or “CCA”; (Takeuchi et al., Agents Actions 36:312-316, (1992)); and metalloproteinase inhibitors such as BB94.

[0976] Additional anti-angiogenic factors that may also be utilized within the context of the present invention include Thalidomide, (Celgene, Warren, N.J.); Angiostatic steroid; AGM-1470 (H. Brem and J. Folkman J Pediatr. Surg. 28:445-51 (1993)); an integrin alpha v beta 3 antagonist (C. Storgard et al., J Clin. Invest. 103:47-54 (1999)); carboxynaminolmidazole; Carboxyamidotriazole (CAI) (National Cancer Institute, Bethesda, Md.); Conbretastatin A-4 (CA4P) (OXiGENE, Boston, Mass.); Squalamine (Magainin Pharmaceuticals, Plymouth Meeting, Pa.); TNP-470, (Tap Pharmaceuticals, Deerfield, Ill.); ZD-0101 AstraZeneca (London, UK); APRA (CT2584); Benefin, Byrostatin-1 (SC339555); CGP-41251-(PKC 412); CM1O1; Dexrazoxane (ICRF187); DMXAA; Endostatin; Flavopridiol; Genestein; GTE; ImmTher; Iressa (ZD1839); Octreotide (Somatostatin); Panretin; Penacillamine; Photopoint; PI-88; Prinomastat (AG-3340) Purlytin; Suradista (FCE26644); Tamoxifen (Nolvadex); Tazarotene; Tetrathiomolybdate; Xeloda (Capecitabine); and 5-Fluorouracil.

[0977] Anti-angiogenic agents that may be administered in combination with the compounds of the invention may work through a variety of mechanisms including, but not limited to, inhibiting proteolysis of the extracellular matrix, blocking the function of endothelial cell-extracellular matrix adhesion molecules, by antagonizing the function of angiogenesis inducers such as growth factors, and inhibiting integrin receptors expressed on proliferating endothelial cells. Examples of anti-angiogenic inhibitors that interfere with extracellular matrix proteolysis and which may be administered in combination with the compositions of the invention include, but are not limited to, AG-3340 (Agouron, La Jolla, Calif.), BAY-12-9566 (Bayer, West Haven, Conn.), BMS-275291 (Bristol Myers Squibb, Princeton, N.J.), CGS-27032A (Novartis, East Hanover, N.J.), Marimastat (British Biotech, Oxford, UK), and Metastat (Aeterna, St-Foy, Quebec). Examples of anti-angiogenic inhibitors that act by blocking the function of endothelial cell-extracellular matrix adhesion molecules and which may be administered in combination with the compositons of the invention include, but are not limited to, EMD-121974 (Merck KcgaA Darmstadt, Germany) and Vitaxin (Ixsys, La Jolla, Calif./Medimmune, Gaithersburg, Md.). Examples of anti-angiogenic agents that act by directly antagonizing or inhibiting angiogenesis inducers and which may be administered in combination with the compositons of the invention include, but are not limited to, Angiozyme (Ribozyme, Boulder, Colo.), Anti-VEGF antibody (Genentech, S. San Francisco, Calif.), PTK-787/ZK-225846 (Novartis, Basel, Switzerland), SU-101 (Sugen, S. San Francisco, Calif.), SU-5416 (Sugen/ Pharmacia Upjohn, Bridgewater, N.J.), and SU-6668 (Sugen). Other anti-angiogenic agents act to indirectly inhibit angiogenesis. Examples of indirect inhibitors of angiogenesis which may be administered in combination with the compositons of the invention include, but are not limited to, IM-862 (Cytran, Kirkland, Wash.), Interferon-alpha, IL-12 (Roche, Nutley, N.J.), and Pentosan polysulfate (Georgetown University, Washington, D.C.).

[0978] In particular embodiments, the use of compositions of the invention in combination with anti-angiogenic agents is contemplated for the treatment, prevention, and/or amelioration of an autoimmune disease, such as for example, an autoimmune disease described herein.

[0979] In a particular embodiment, the use of compositions of the invention in combination with anti-angiogenic agents is contemplated for the treatment, prevention, and/or amelioration of arthritis. In a more particular embodiment, the use of compositions of the invention in combination with anti-angiogenic agents is contemplated for the treatment, prevention, and/or amelioration of rheumatoid arthritis.

[0980] In another embodiment, the polynucleotides encoding a polypeptide of the present invention are administered in combination with an angiogenic protein, or polynucleotides encoding an angiogenic protein. Examples of angiogenic proteins that may be administered with the compositions of the invention include, but are not limited to, acidic and basic fibroblast growth factors, VEGF-1, VEGF-2, VEGF-3, epidermal growth factor alpha and beta, platelet-derived endothelial cell growth factor, platelet-derived growth factor, tumor necrosis factor alpha, hepatocyte growth factor, insulin-like growth factor, colony stimulating factor, macrophage colony stimulating factor, granulocyte/macrophage colony stimulating factor, and nitric oxide synthase.

[0981] In additional embodiments, compostions of the invention are administered in combination with a chemotherapeutic agent. Chemotherapeutic agents that may be administered with the Therapeutics of the invention include, but are not limited to alkylating agents such as nitrogen mustards (for example, Mechlorethamine, cyclophosphamide, Cyclophosphamide Ifosfamide, Melphalan (L-sarcolysin), and Chlorambucil), ethylenimines and methylmelamines (for example, Hexamethylmelamine and Thiotepa), alkyl sulfonates (for example, Busulfan), nitrosoureas (for example, Carmustine (BCNU), Lomustine (CCNU), Semustine (methyl-CCNU), and Streptozocin (streptozotocin)), triazenes (for example, Dacarbazine (DTIC; dimethyltriazenoimidazolecarboxamide)), folic acid analogs (for example, Methotrexate (amethopterin)), pyrimidine analogs (for example, Fluorouacil (5-fluorouracil; 5-FU), Floxuridine (fluorodeoxyuridine; FudR), and Cytarabine (cytosine arabinoside)), purine analogs and related inhibitors (for example, Mercaptopurine (6-mercaptopurine; 6-MP), Thioguanine (6-thioguanine; TG), and Pentostatin (2′-deoxycoformycin)), vinca alkaloids (for example, Vinblastine (VLB, vinblastine sulfate) and Vincristine (vincristine sulfate)), epipodophyllotoxins (for example, Etoposide and Teniposide), antibiotics (for example, Dactinomycin (actinomycin D), Daunorubicin (daunomycin; rubidomycin), Doxorubicin, Bleomycin, Plicamycin (mithramycin), and Mitomycin (mitomycin C), enzymes (for example, L-Asparaginase), biological response modifiers (for example, Interferon-alpha and interferon-alpha-2b), platinum coordination compounds (for example, Cisplatin (cis-DDP) and Carboplatin), anthracenedione (Mitoxantrone), substituted ureas (for example, Hydroxyurea), methylhydrazine derivatives (for example, Procarbazine (N-methylhydrazine; MIH), adrenocorticosteroids (for example, Prednisone), progestins (for example, Hydroxyprogesterone caproate, Medroxyprogesterone, Medroxyprogesterone acetate, and Megestrol acetate), estrogens (for example, Diethylstilbestrol (DES), Diethylstilbestrol diphosphate, Estradiol, and Ethinyl estradiol), antiestrogens (for example, Tamoxifen), androgens (Testosterone proprionate, and Fluoxymesterone), antiandrogens (for example, Flutamide), gonadotropin-releasing horomone analogs (for example, Leuprolide), other hormones and hormone analogs (for example, methyltestosterone, estramustine, estramustine phosphate sodium, chlorotrianisene, and testolactone), and others (for example, dicarbazine, glutamic acid, and mitotane).

[0982] In one embodiment, the compositions of the invention are administered in combination with one or more of the following drugs: infliximab (also known as Remicade™ Centocor, Inc.), Trocade (Roche, RO-32-3555), Leflunomide (also known as Arava™ from Hoechst Marion Roussel), Kineret™ (an IL-1 Receptor antagonist also known as Anakinra from Amgen, Inc.).

[0983] In a specific embodiment, compositions of the invention are administered in combination with CHOP (cyclophosphamide, doxorubicin, vincristine, and prednisone) or combination of one or more of the components of CHOP. In one embodiment, the compositions of the invention are administered in combination with anti-CD20 antibodies, human monoclonal anti-CD20 antibodies. In another embodiment, the compositions of the invention are administered in combination with anti-CD20 antibodies and CHOP, or anti-CD20 antibodies and any combination of one or more of the components of CHOP, particularly cyclophosphamide and/or prednisone. In a specific embodiment, compositions of the invention are administered in combination with Rituximab. In a further embodiment, compositions of the invention are administered with Rituximab and CHOP, or Rituximab and any combination of one or more of the components of CHOP, particularly cyclophosphamide and/or prednisone. In a specific embodiment, compositions of the invention are administered in combination with tositumomab. In a further embodiment, compositions of the invention are administered with tositumomab and CHOP, or tositumomab and any combination of one or more of the components of CHOP, particularly cyclophosphamide and/or prednisone. The anti-CD20 antibodies may optionally be associated with radioisotopes, toxins or cytotoxic prodrugs.

[0984] In another specific embodiment, the compositions of the invention are administered in combination Zevalin™. In a further embodiment, compositions of the invention are administered with Zevalin™ and CHOP, or Zevalin™ and any combination of one or more of the components of CHOP, particularly cyclophosphamide and/or prednisone. Zevalin™ may be associated with one or more radisotopes. Particularly preferred isotopes are ⁹⁰Y and ¹¹¹In.

[0985] In an additional embodiment, the Therapeutics of the invention are administered in combination with cytokines. Cytokines that may be administered with the Therapeutics of the invention-include, but are not limited to, IL2, IL3, IL4, IL5, IL6, IL7, IL10, IL12, IL13, IL15, anti-CD40, CD40L, IFN-gamma and TNF-alpha. In another embodiment, Therapeutics of the invention may be administered with any interleukin, including, but not limited to, IL-1alpha, IL-1beta, IL-2, IL-3, IL-4, IL-5, IL-6, IL-7, IL-8, IL-9, IL-10, IL-11, IL-12, IL-13, IL-14, IL-15, IL-16, IL-17, IL-18, IL-19, IL-20, and IL-21.

[0986] In one embodiment, the Therapeutics of the invention are administered in combination with members of the TNF family. TNF, TNF-related or TNF-like molecules that may be administered with the Therapeutics of the invention include, but are not limited to, soluble forms of TNF-alpha, lymphotoxin-alpha (LT-alpha, also known as TNF-beta), LT-beta (found in complex heterotrimer LT-alpha2-beta), OPGL, FasL, CD27L, CD30L, CD40L, 4-1BBL, DcR3, OX40L, TNF-gamma (International Publication No. WO 96/14328), AIM-I (International Publication No. WO 97/33899), endokine-alpha (International Publication No. WO 98/07880), OPG, and neutrokine-alpha (International Publication No. WO 98/18921, OX40, and nerve growth factor (NGF), and soluble forms of Fas, CD30, CD27, CD40 and 4-IBB, TR2 (International Publication No. WO 96/34095), DR3 (International Publication No. WO 97/33904), DR4 (International Publication No. WO 98/32856), TR5 (International Publication No. WO 98/30693), TRANK, TR9 (International Publication No. WO 98/56892),TR10 (International Publication No. WO 98/54202), 312C2 (International Publication No. WO 98/06842), and TRI2, and soluble forms CD154, CD70, and CD153.

[0987] In an additional embodiment, the Therapeutics of the invention are administered in combination with angiogenic proteins. Angiogenic proteins that may be administered with the Therapeutics of the invention include, but are not limited to, Glioma Derived Growth Factor (GDGF), as disclosed in European Patent Number EP-399816; Platelet Derived Growth Factor-A (PDGF-A), as disclosed in European Patent Number EP-682110; Platelet Derived Growth Factor-B (PDGF-B), as disclosed in European Patent Number EP-282317; Placental Growth Factor (PlGF), as disclosed in International Publication Number WO 92/06194; Placental Growth Factor-2 (PIGF-2), as disclosed in Hauser et al., Growth Factors, 4:259-268 (1993); Vascular Endothelial Growth Factor (VEGF), as disclosed in International Publication Number WO 90/13649; Vascular Endothelial Growth Factor-A (VEGF-A), as disclosed in European Patent Number EP-506477; Vascular Endothelial Growth Factor-2 (VEGF 2), as disclosed in International Publication Number WO 96/39515; Vascular Endothelial Growth Factor B (VEGF-3); Vascular Endothelial Growth Factor B-186 (VEGF-B186), as disclosed in International Publication Number WO 96/26736; Vascular Endothelial Growth Factor-D (VEGF-D), as disclosed in International Publication Number WO 98/02543; Vascular Endothelial Growth Factor-D (VEGF-D), as disclosed in International Publication Number WO 98/07832; and Vascular Endothelial Growth Factor-E (VEGF-E), as disclosed in German Patent Number DE19639601. The above mentioned references are herein incorporated by reference in their entireties.

[0988] In an additional embodiment, the Therapeutics of the invention are administered in combination with Fibroblast Growth Factors. Fibroblast Growth Factors that may be administered with the Therapeutics of the invention include, but are not limited to, FGF-l, FGF-2, FGF-3, FGF-4, FGF-5, FGF-6, FGF-7, FGF-8, FGF-9, FGF-10, FGF-11, FGF-12, FGF-13, FGF-14, and FGF-15.

[0989] In an additional embodiment, the Therapeutics of the invention are administered in combination with hematopoietic growth factors. Hematopoietic growth factors that may be administered with the Therapeutics of the invention include, but are not limited to, granulocyte macrophage colony stimulating factor (GM-CSF) (sargramostim, LEUKINE™, PROKINE™), granulocyte colony stimulating factor (G-CSF) (filgrastim, NEUPOGEN™), macrophage colony stimulating factor (M-CSF, CSF-1) erythropoietin (epoetin alfa, EPOGEN™, PROCRIT™ ), stem cell factor (SCF, c-kit ligand, steel factor), megakaryocyte colony stimulating factor, PIXY321 (a GMCSF/IL-3 fusion protein), interleukins, especially any one or more of IL-1 through IL-12, interferon-gamma, or thrombopoietin.

[0990] In certain embodiments, Therapeutics of the present invention are administered in combination with adrenergic blockers, such as, for example, acebutolol, atenolol, betaxolol, bisoprolol, carteolol, labetalol, metoprolol, nadolol, oxprenolol, penbutolol, pindolol, propranolol, sotalol, and timolol.

[0991] In another embodiment, the Therapeutics of the invention are administered in combination with an antiarrhythmic drug (e.g., adenosine, amidoarone, bretylium, digitalis, digoxin, digitoxin, diliazem, disopyramide, esmolol, flecainide, lidocaine, mexiletine, moricizine, phenytoin, procainamide, N-acetyl procainamide, propafenone, propranolot, quinidine, sotalol, tocainide, and verapamil).

[0992] In another embodiment, the Therapeutics of the invention are administered in combination with diuretic agents, such as carbonic anhydrase-inhibiting agents (e.g., acetazolamide, dichlorphenamide, and methazolamide), osmotic diuretics (e.g., glycerin, isosorbide, mannitol, and urea), diuretics that inhibit Na⁺-K⁺-2Cl⁻symport (e.g., furosemide, bumetanide, azosemide, piretanide, tripamide, ethacrynic acid, muzolimine, and torsemide), thiazide and thiazide-like diuretics (e.g., bendroflumethiazide, benzthiazide, chlorothiazide, hydrochlorothiazide, hydroflumethiazide, methyclothiazide, polythiazide, trichormethiazide, chlorthalidone, indapamide, metolazone, and quinethazone), potassium sparing diuretics (e.g., amiloride and triamterene), and mineralcorticoid receptor antagonists (e.g., spironolactone, canrenone, and potassium canrenoate).

[0993] In one embodiment, the Therapeutics of the invention are administered in combination with treatments for endocrine and/or hormone imbalance disorders. Treatments for endocrine and/or hormone imbalance disorders include, but are not limited to, ¹²⁷I, radioactive isotopes of iodine such as ¹³¹I and 123I; recombinant growth hormone, such as HUMATROPE™ (recombinant somatropin); growth hormone analogs such as PROTROPIN™ (somatrem); dopamine agonists such as PARLODEL™ (bromocriptine); somatostatin analogs such as SANDOSTATIN™ (octreotide); gonadotropin preparations such as PREGNYL™, A.P.L.™ and PROFASI™ (chorionic gonadotropin (CG)), PERGONAL™ (menotropins), and METRODIN™ (urofollitropin (uFSH)); synthetic human gonadotropin releasing hormone preparations such as FACTREL™ and LUTREPULSE™ (gonadorelin hydrochloride); synthetic gonadotropin agonists such as LUPRON™ (leuprolide acetate), SUPPRELIN™ (histrelin acetate), SYNAREL™ (nafarelin acetate), and ZOLADEX™ (goserelin acetate); synthetic preparations of thyrotropin-releasing hormone such as RELEFACT TRHM and THYPINONE™(protirelin); recombinant human TSH such as THYROGEN™; synthetic preparations of the sodium salts of the natural isomers of thyroid hormones such as L-T₄™, SYNTHROID™ and LEVOTHROID™ (levothyroxine sodium), L-T₃™, CYTOMEL™ and TRIOSTAT™ (liothyroine sodium), and THYROLAR™ (liotrix); antithyroid compounds such as 6-n-propylthiouracil (propylthiouracil), 1-methyl-2-mercaptoimidazole and TAPAZOLE™ (methimazole), NEO-MERCAZOLE™ (carbimazole); beta-adrenergic receptor antagonists such as propranolol and esmolol; Ca²⁺ channel blockers; dexamethasone and iodinated radiological contrast agents such as TELEPAQUE™ (iopanoic acid) and ORAGRAFIN™ (sodium ipodate); estrogens or congugated estrogens such as ESTRACE™ (estradiol), ESTINYL™ (ethinyl estradiol), PREMARIN™, ESTRATAB™, ORTHO-EST™, OGEN™ and estropipate (estrone), ESTROVIS™ (quinestrol), ESTRADERM™ (estradiol), DELESTROGEN™ and VALERGEN™ (estradiol valerate), DEPO-ESTRADIOL CYPIONATE™ and ESTROJECT LA™ (estradiol cypionate); antiestrogens such as NOLVADEX™ (tamoxifen), SEROPHENE™ and CLOMID™ (clomiphene); progestins such as DURALUTIN™ (hydroxyprogesterone caproate), MPA™ and DEPO-PROVERA™ (medroxyprogesterone acetate), PROVERA™ and CYCRIN™ (MPA), MEGACE™ (megestrol acetate), NORLUTIN™ (norethindrone), and NORLUTATE™ and AYGESTIN™ (norethindrone acetate); progesterone implants such as NORPLANT SYSTEM™ (subdermal implants of norgestrel); antiprogestins such as RU 486™ (mifepristone); hormonal contraceptives such as ENOVID™ (norethynodrel plus mestranol), PROGESTASERT™ (intrauterine device that releases progesterone), LOESTRIN™, BREVICON™, MODICON™, GENORA™, NELONA™, NORINYL™, OVACON-35™ and OVACON-50™ (ethinyl estradiol/norethindrone), LEVLEN™, NORDETTE™, TRI-LEVLEN™ and TRIPHASIL-21™ (ethinyl estradiol/levonorgestrel) LO/OVRAL™ and OVRAL™ (ethinyl estradiol/norgestrel), DEMULEN™ (ethinyl estradiol/ethynodiol diacetate), NORINYL™, ORTHO-NOVUM™, NORETHIN™, GENORAT™, and NELOVAT™ (norethindrone/mestranol), DESOGEN™ and ORTHO-CEPT™ (ethinyl estradiol/desogestrel), ORTHO-CYCLEN™ and ORTHO-TRICYCLENT™ (ethinyl estradiol/norgestimate), MICRONOR™ and NOR-QD™ (norethindrone), and OVRETTE™ (norgestrel); testosterone esters such as methenolone acetate and testosterone undecanoate; parenteral and oral androgens such as TESTOJECT-50™ (testosterone), TESTEX™ (testosterone propionate), DELATESTRYL™ (testosterone enanthate), DEPO-TESTOSTERONE™ (testosterone cypionate), DANOCRINE™ (danazol), HALOTESTIN™ (fluoxymesterone), ORETON METHYL™, TESTRED™ and VIRILON™ (methyltestosterone), and OXANDRIN™ (oxandrolone); testosterone transdermal systems such as TESTODER™; androgen receptor antagonist and 5-alpha-reductase inhibitors such as ANDROCUR™ (cyproterone acetate), EULEXIN™ (flutamide), and PROSCAR™ (finasteride); adrenocorticotropic hormone preparations such as CORTROSYN™ (cosyntropin); adrenocortical steroids and their synthetic analogs such as ACLOVATE™ (alclometasone dipropionate), CYCLOCORT™ (amcinonide), BECLOVENT™ and VANCERIL™ (beclomethasone dipropionate), CELESTONE™ (betamethasone), BENISONE ™ and UTICORT™ (betamethasone benzoate), DIPROSONE™ (betamethasone dipropionate), CELESTONE PHOSPHATE™ (betamethasone sodium phosphate), CELESTONE SOLUSPAN™ (betamethasone sodium phosphate and acetate), BETA-VAL™ and VALISONE™ (betamethasone valerate), TEMOVATE™ (clobetasol propionate), CLODERM™ (clocortolone pivalate), CORTEF™ and HYDROCORTONE™ (cortisol (hydrocortisone)), HYDROCORTONE ACETATE™ (cortisol (hydrocortisone) acetate), LOCOID™ (cortisol (hydrocortisone) butyrate), HYDROCORTONE PHOSPHATE™ (cortisol (hydrocortisone) sodium phosphate), A-HYDROCORT™ and SOLU CORTEF™ (cortisol (hydrocortisone) sodium succinate), WESTCORT™ (cortisol (hydrocortisone) valerate), CORTISONE ACETATE™ (cortisone acetate), DESOWEN™ and TRIDESILON™ (desonide), TOPICORT™ (desoximetasone), DECADRON™ (dexamethasone), DECADRON LA™ (dexamethasone acetate), DECADRON PHOSPHATE™ and HEXADROL PHOSPHATE™ (dexamethasone sodium phosphate), FLORONE™ and MAXIFLOR™ (diflorasone diacetate), FLORINEF ACETATE™ (fludrocortisone acetate), AEROBID™ and NASALIDE™ (flunisolide), FLUONID™ and SYNALAR™ (fluocinolone acetonide), LIDEX™ (fluocinonide), FLUOR-OPT™ and FMLT™ (fluorometholone), CORDRAN™ (flurandrenolide), HALOG™ (halcinonide), HMS LIZUIFILM™ (medrysone), MEDROL™ (methylprednisolone), DEPO-MEDROL™ and MEDROL ACETATE™ (methylprednisone acetate), A-METHAPRED™ and SOLUMEDROL™ (methylprednisolone sodium succinate), ELOCON™ (mometasone furoate), HALDRONE™ (paramethasone acetate), DELTA-CORTEF™ (prednisolone), ECONOPRED™ (prednisolone acetate), HYDELTRASOL™ (prednisolone sodium phosphate), HYDELTRA-T.B.A™ (prednisolone tebutate), DELTASONE™ (prednisone), ARISTOCORT™ and KENACORT™ (triamcinolone), KENALOG™ (triamcinolone acetonide), ARISTOCORT™ and KENACORT DIACETATE™ (triamcinolone diacetate), and ARISTOSPAN™ (triamcinolone hexacetonide); inhibitors of biosynthesis and action of adrenocortical steroids such as CYTADREN™ (aminoglutethimide), NIZORAL™ (ketoconazole), MODRASTANE™ (trilostane), and METOPIRONE™ (metyrapone); bovine, porcine or human insulin or mixtures thereof; insulin analogs; recombinant human insulin such as HUMULIN™ and NOVOLIN™; oral hypoglycemic agents such-as ORAMIDE™ and ORINASE™ (tolbutamide), DIABINESE™ (chlorpropamide), TOLAMIDE™ and TOLINASE™ (tolazamide), DYMELOR™ (acetohexamide), glibenclamide, MICRONASE™, DIBETA™ and GLYNASE™ (glyburide), GLUCOTROL™ (glipizide), and DIAMICRON™ (gliclazide), GLUCOPHAGEM (metformin), ciglitazone, pioglitazone, and alpha-glucosidase inhibitors; bovine or porcine glucagon; somatostatins such as SANDOSTATIN™ (octreotide); and diazoxides such as PROGLYCEM™ (diazoxide).

[0994] In one embodiment, the Therapeutics of the invention are administered in combination with treatments for uterine motility disorders. Treatments for uterine motility disorders include, but are not limited to, estrogen drugs such as conjugated estrogens (e.g., PREMARIN® and ESTRATAB®), estradiols (e.g., CLIMARA® and ALORA®), estropipate, and chlorotrianisene; progestin drugs (e.g., AMEN® (medroxyprogesterone), MICRONOR® (norethidrone acetate), PROMETRIUM® progesterone, and megestrol acetate); and estrogen/progesterone combination therapies such as, for example, conjugated estrogens/medroxyprogesterone (e.g., PREMPRO™ and PREMPHASE®) and norethindrone acetate/ethinyl estsradiol (e.g., FEMHRT™).

[0995] In an additional embodiment, the Therapeutics of the invention are administered in combination with drugs effective in treating iron deficiency and hypochromic anemias, including but not limited to, ferrous sulfate (iron sulfate, FEOSOL™), ferrous fumarate (e.g., FEOSTAT™), ferrous gluconate (e.g., FERGON™), polysaccharide-iron complex (e.g., NIFEREX™), iron dextran injection (e.g., INFED™), cupric sulfate, pyroxidine, riboflavin, Vitamin B1₂, cyancobalamin injection (e.g., REDISOL™, RUBRAMIN PC™), hydroxocobalamin, folic acid (e.g., FOLVITE™), leucovorin (folinic acid, 5-CHOH4PteGlu, citrovorum factor) or WELLCOVORIN (Calcium salt of leucovorin), transferrin or ferritin.

[0996] In certain embodiments, the Therapeutics of the invention are administered in combination with agents used to treat psychiatric disorders. Psychiatric drugs that may be administered with the Therapeutics of the invention include, but are not limited to, antipsychotic agents (e.g., chlorpromazine, chlorprothixene, clozapine, fluphenazine, haloperidol, loxapine, mesoridazine, molindone, olanzapine, perphenazine, pimozide, quetiapine, risperidone, thioridazine, thiothixene, trifluoperazine, and triflupromazine), antimanic agents (e.g., carbamazepine, divalproex sodium, lithium carbonate, and lithium citrate), antidepressants (e.g., amitriptyline, amoxapine, bupropion, citalopram, clomipramine, desipramine, doxepin, fluvoxamine, fluoxetine, imipramine, isocarboxazid, maprotiline, mirtazapine, nefazodone, nortriptyline, paroxetine, phenelzine, protriptyline, sertraline, tranylcypromine, trazodone, trimipramine, and venlafaxine), antianxiety agents (e.g., alprazolam, buspirone, chlordiazepoxide, clorazepate, diazepam, halazepam, lorazepam, oxazepam, and prazepam), and stimulants (e.g., d-amphetamine, methylphenidate, and pemoline).

[0997] In other embodiments, the Therapeutics of the invention are administered in combination with agents used to treat neurological disorders. Neurological agents that may be administered with the Therapeutics of the invention include, but are not limited to, antiepileptic agents (e.g., carbamazepine, clonazepam, ethosuximide, phenobarbital, phenytoin, primidone, valproic acid, divalproex sodium, felbamate, gabapentin, lamotrigine, levetiracetam, oxcarbazepine, tiagabine, topiramate, zonisamide, diazepam, lorazepam, and clonazepam), antiparkinsonian agents (e.g., ievodopa/carbidopa, selegiline, amantidine, bromocriptine, pergolide, ropinirole, pramipexole, benztropine; biperiden; ethopropazine; procyclidine; trihexyphenidyl, tolcapone), and ALS therapeutics (e.g. riluzole).

[0998] In another embodiment, Therapeutics of the invention are administered in combination with vasodilating agents and/or calcium channel blocking agents. Vasodilating agents that may be administered with the Therapeutics of the invention include, but are not limited to, Angiotensin Converting Enzyme (ACE) inhibitors (e.g., papaverine, isoxsuprine, benazepril, captopril, cilazapril, enalapril, enalaprilat, fosinopril, lisinopril, moexipril, perindopril, quinapril, ramipril, spirapril, trandolapril, and nylidrin), and nitrates (e.g., isosorbide dinitrate, isosorbide mononitrate, and nitroglycerin). Examples of calcium channel blocking agents that may be administered in combination with the Therapeutics of the invention include, but are not limited to amlodipine, bepridil, diltiazem, felodipine, flunarizine, isradipine, nicardipine, nifedipine, nimodipine, and verapamil.

[0999] In additional embodiments, the Therapeutics -of the invention are administered in combination with other therapeutic or prophylactic regimens, such as, for example, radiation therapy.

### Example 14

### Method of Treating Decreased Levels of the Polypeptide

[1000] The present invention relates to a method for treating an individual in need of an increased level of a polypeptide of the invention in the body comprising administering to such an individual a composition comprising a therapeutically effective amount of an agonist of the invention (including polypeptides of the invention). Moreover, it will be appreciated that conditions caused by a decrease in the standard or normal expression level of a polypeptide of the present invention in an individual can be treated by administering the agonist or antagonist of the present invention. Thus, the invention also provides a method of treatment of an individual in need of an increased level of the polypeptide comprising administering to such an individual a Therapeutic comprising an amount of the agonist or antagonist to increase the activity level of the polypeptide in such an individual.

[1001] For example, a patient with decreased levels of a polypeptide receives a daily dose 0.1-100 ug/kg of the agonist or antagonist for six consecutive days. The exact details of the dosing scheme, based on administration and formulation, are provided in Example 13.

### Example 15

### Method of Treating Increased Levels of the Polypeptide

[1002] The present invention also relates to a method of treating an individual in need of a decreased level of a polypeptide of the invention in the body comprising administering to such an individual a composition comprising a therapeutically effective amount of an antagonist of the invention (including polypeptides and antibodies of the invention).

[1003] In one example, antisense technology is used to inhibit production of a polypeptide of the present invention. This technology is one example of a method of decreasing levels of a polypeptide, due to a variety of etiologies, such as cancer.

[1004] For example, a patient diagnosed with abnormally increased levels of a polypeptide is administered intravenously antisense polynucleotides at 0.5, 1.0, 1.5, 2.0 and 3.0 mg/kg day for 21 days. This treatment is repeated after a 7-day rest period if the treatment was well tolerated. The formulation of the antisense polynucleotide is provided in Example 13.

### Example 16

### Method of Treatment Using Gene Therapy-Ex Vivo

[1005] One method of gene therapy transplants fibroblasts, which are capable of expressing a polypeptide, onto a patient. Generally, fibroblasts are obtained from a subject by skin biopsy. The resulting tissue is placed in tissue-culture medium and separated into small pieces. Small chunks of the tissue are placed on a wet surface of a tissue culture flask, approximately ten pieces are placed in each flask. The flask is turned upside down, closed tight and left at room temperature over night. After 24 hours at room temperature, the flask is inverted and the chunks of tissue remain fixed to the bottom of the flask and fresh media (e.g., Ham's F12 media, with 10% FBS, penicillin and streptomycin) is added. The flasks are then incubated at 37 degree C. for approximately one week.

[1006] At this time, fresh media is added and subsequently changed every several days. After an additional two weeks in culture, a monolayer of fibroblasts emerge. The monolayer is trypsinized and scaled into larger flasks.

[1007] pMV-7 (Kirschmeier, P. T. et al., DNA, 7:219-25 (1988)), flanked by the long terminal repeats of the Moloney murine sarcoma virus, is digested with EcoRI and HindIII and subsequently treated with calf intestinal phosphatase. The linear vector is fractionated on agarose gel and purified, using glass beads.

[1008] The cDNA encoding a polypeptide of the present invention can be amplified using PCR primers which correspond to the 5′ and 3′ end sequences respectively as set forth in Example 1 using primers and having appropriate restriction sites and initiation/stop codons, if necessary. Preferably, the 5′ primer contains an EcoRI site and the 3′ primer includes a HindIII site. Equal quantities of the Moloney murine sarcoma virus linear backbone and the amplified EcoRI and HindIII fragment are added together, in the presence of T4 DNA ligase. The resulting mixture is maintained under conditions appropriate for ligation of the two fragments. The ligation mixture is then used to transform bacteria HB 101, which are then plated onto agar containing kanamycin for the purpose of confirming that the vector has the gene of interest properly inserted.

[1009] The amphotropic pA317 or GP+aml2 packaging cells are grown in tissue culture to confluent density in Dulbecco's Modified Eagles Medium (DMEM) with 10% calf serum (CS), penicillin and streptomycin. The MSV vector containing the gene is then added to the media and the packaging cells transduced with the vector. The packaging cells now produce infectious viral particles containing the gene (the packaging cells are now referred to as producer cells).

[1010] Fresh media is added to the transduced producer cells, and subsequently, the media is harvested from a 10 cm plate of confluent producer cells. The spent media, containing the infectious viral particles, is filtered through a millipore filter to remove detached producer cells and this media is then used to infect fibroblast cells. Media is removed from a sub-confluent plate of fibroblasts and quickly replaced with the media from the producer cells. This media is removed and replaced with fresh media. If the titer of virus is high, then virtually all fibroblasts will be infected and no selection is required. If the titer is very low, then it is necessary to use a retroviral vector that has a selectable marker, such as neo or his. Once the fibroblasts have been efficiently infected, the fibroblasts are analyzed to determine whether protein is produced.

[1011] The engineered fibroblasts are then transplanted onto the host, either alone or after having been grown to confluence on cytodex 3 microcarrier beads.

### Example 17

### Gene Therapy Using Endogenous Genes Corresponding to Polynucleotides of the Invention

[1012] Another method of gene therapy according to the present invention involves operably associating the endogenous polynucleotide sequence of the invention with a promoter via homologous recombination as described, for example, in U.S. Pat. No.: 5,641,670, issued Jun. 24, 1997; International Publication NO: WO 96/29411, published Sep. 26, 1996; International Publication NO: WO 94/12650, published Aug. 4, 1994; Koller et al., Proc. Natl. Acad. Sci. USA, 86:8932-8935 (1989); and Zijlstra et al., Nature, 342:435-438 (1989). This method involves the activation of a gene which is present in the target cells, but which is not expressed in the cells, or is expressed at a lower level than desired.

[1013] Polynucleotide constructs are made which contain a promoter and targeting sequences, which are homologous to the 5′ non-coding sequence of endogenous polynucleotide sequence, flanking the promoter. The targeting sequence will be sufficiently near the 5′ end of the polynucleotide sequence so the promoter will be operably linked to the endogenous sequence upon homologous recombination. The promoter and the targeting sequences can be amplified using PCR. Preferably, the amplified promoter contains distinct restriction enzyme sites on the 5′ and 3′ ends. Preferably, the 3′ end of the first targeting sequence contains the same restriction enzyme site as the 5′ end of the amplified promoter and the 5′ end of the second targeting sequence contains the same restriction site as the 3′ end of the amplified promoter.

[1014] The amplified promoter and the amplified targeting sequences are digested with the appropriate restriction enzymes and subsequently treated with calf intestinal phosphatase. The digested promoter and digested targeting sequences are added together in the presence of T4 DNA ligase. The resulting mixture is maintained under conditions appropriate for ligation of the two fragments. The construct is size fractionated on an agarose gel, then purified by phenol extraction and ethanol precipitation.

[1015] In this Example, the polynucleotide constructs are administered as naked polynucleotides via electroporation. However, the polynucleotide constructs may also be administered with transfection-facilitating agents, such as liposomes, viral sequences, viral particles, precipitating agents, etc. Such methods of delivery are known in the art.

[1016] Once the cells are transfected, homologous recombination will take place which results in the promoter being operably linked to the endogenous polynucleotide sequence. This results in the expression of polynucleotide corresponding to the polynucleotide in the cell. Expression may be detected by immunological staining, or any other method known in the art.

[1017] Fibroblasts are obtained from a subject by skin biopsy. The resulting tissue is placed in DMEM+10% fetal calf serum. Exponentially growing or early stationary phase fibroblasts are trypsinized and rinsed from the plastic surface with nutrient medium. An aliquot of the cell suspension is removed for counting, and the remaining cells are subjected to centrifugation. The supernatant is aspirated and the pellet is resuspended in 5 ml of electroporation buffer (20 mM HEPES pH 7.3, 137 mM NaCl, 5 mM KCl, 0.7 mM Na₂ HPO₄, 6 mM dextrose). The cells are recentrifuged, the supernatant aspirated, and the cells resuspended in electroporation buffer containing 1 mg/ml acetylated bovine serum albumin. The final cell suspension contains approximately 3×10⁶ cells/ml. Electroporation should be performed immediately following resuspension.

[1018] Plasmid DNA is prepared according to standard techniques. For example, to construct a plasmid for targeting to the locus corresponding to the polynucleotide of the invention, plasmid pUC18 (MBI Fermentas, Amherst, N.Y.) is digested with HindIII. The CMV promoter is amplified by PCR with an XbaI site on the 5′ end and a BamHI site on the 3′ end. Two non-coding sequences are amplified via PCR: one non-coding sequence (fragment 1) is amplified with a HindIII site at the 5′ end and an Xba site at the 3′ end; the other non-coding sequence (fragment 2) is amplified with a BamHI site at the Send and a HindIII site at the 3′ end. The CMV promoter and the fragments (1 and 2) are digested with the appropriate enzymes (CMV promoter—XbaI and BamHI; fragment 1-XbaI; fragment 2-BamHI) and ligated together. The resulting ligation product is digested with HindIII, and ligated with the HindIII digested pUCJ 8 plasmid.

[1019] Plasmid DNA is added to a sterile cuvette with a 0.4 cm electrode gap (Bio-Rad). The final DNA concentration is generally at least 120 μg/ml. 0.5 ml of the cell suspension (containing approximately 1.5×10⁶ cells) is then added to the cuvette, and the cell suspension and DNA solutions are gently mixed. Electroporation is performed with a Gene-Pulser apparatus (Bio-Rad). Capacitance and voltage are set at 960 μF and 250-300 V, respectively. As voltage increases, cell survival decreases, but the percentage of surviving cells that stably incorporate the introduced DNA into their genome increases dramatically. Given these parameters, a pulse time -of approximately 14-20 mSec should be observed.

[1020] Electroporated cells are maintained at room temperature for approximately 5 min, and the contents of the cuvette are then gently removed with a sterile transfer pipette. The cells are added directly to 10 ml of prewarmed nutrient media (DMEM with 15% calf serum) in a 10 cm dish and incubated at 37 degree C. The following day, the media is aspirated and replaced with 10 ml of fresh media and incubated for a further 16-24 hours.

[1021] The engineered fibroblasts are then injected into the host, either alone or after having been grown to confluence on cytodex 3 microcarrier beads. The fibroblasts now produce the protein product. The fibroblasts can then be introduced into a patient as described above.

### Example 18

### Method of Treatment Using Gene Therapy—In vivo

[1022] Another aspect of the present invention is using in vivo gene therapy methods to treat disorders, diseases and conditions. The gene therapy method relates to the introduction of naked nucleic acid (DNA, RNA, and antisense DNA or RNA) sequences into an animal to increase or decrease the expression of the polypeptide. The polynucleotide of the present invention may be operatively linked to (i.e., associated with) a promoter or any other genetic elements necessary for the expression of the polypeptide by the target tissue. Such gene therapy and delivery techniques and methods are known in the art, see, for example, W090/1 1092, W098/1 1779; U.S. Pat. Nos. 5,693,622, 5,705,151, 5,580,859; Tabata et al., Cardiovasc. Res. 35(3):470-479 (1997); Chao et al., Pharmacol. Res. 35(6):517-522 (1997); Wolff, Neuromuscul. Disord. 7(5):314-318-(1997); Schwartz et al., Gene Ther. 3(5):405-411 (1996); Tsurumi et al., Circulation 94(12):3281-3290 (1996) (incorporated herein by reference).

[1023] The polynucleotide constructs may be delivered by any method that delivers injectable materials to the cells of an animal, such as, injection into the interstitial space of tissues (heart, muscle, skin, lung, liver, intestine and the like). The polynucleotide constructs can be delivered in a pharmaceutically acceptable liquid or aqueous carrier.

[1024] The term “naked” polynucleotide, DNA or RNA, refers to sequences that are free from any delivery vehicle that acts to assist, promote, or facilitate entry into the cell, including viral sequences, viral particles, liposome formulations, lipofectin or precipitating agents and the like. However, the polynucleotides of the present invention may also be delivered in liposome formulations (such as those taught in Felgner P. L. et al. (1995) Ann. NY Acad. Sci. 772:126-139 and Abdallah B. et al. (1995) Biol. Cell 85(1):1-7) which can be prepared by methods well known to those skilled in the art.

[1025] The polynucleotide vector constructs used in the gene therapy method are preferably constructs that will not integrate into the host genome nor will they contain sequences that allow for replication. Any strong promoter known to those skilled in the art can be used for driving the expression of DNA. Unlike other gene therapy techniques, one major advantage of introducing naked nucleic acid sequences into target cells is the transitory nature of the polynucleotide synthesis in the cells. Studies have shown that non-replicating DNA sequences can be introduced into cells to provide production of the desired polypeptide for periods of up to six months.

[1026] The polynucleotide construct can be delivered to the interstitial space of tissues within an animal, including muscle, skin, brain, lung, liver, spleen, bone marrow, thymus, heart, lymph, blood, bone, cartilage, pancreas, kidney, gall bladder, stomach, intestine, testis, ovary, uterus, rectum, nervous system, eye, gland, and connective tissue. Interstitial space of the tissues comprises the intercellular fluid, mucopolysaccharide matrix among the reticular fibers of organ tissues, elastic fibers in the walls of vessels or chambers, collagen fibers of fibrous tissues, or that same matrix within connective tissue ensheathing muscle cells or in the lacunae of bone. It is similarly the space occupied by the plasma of the circulation and the lymph fluid of the lymphatic channels. Delivery to the interstitial space of muscle tissue is preferred for the reasons discussed below. They may be conveniently delivered by injection into the tissues comprising these cells. They are preferably delivered to and expressed in persistent, non-dividing cells which are differentiated, although delivery and expression may be achieved in non-differentiated or less completely differentiated cells, such as, for example, stem cells of blood or skin fibroblasts. In vivo muscle cells are particularly competent in their ability to take up and express polynucleotides.

[1027] For the naked polynucleotide injection, an effective dosage amount of DNA or RNA will be in the range of from about 0.05 g/kg body weight to about 50 mg/kg body weight. Preferably the dosage will be from about 0.005 mg/kg to about 20 mg/kg and more preferably from about 0.05 mg/kg to about 5 mg/kg. Of course, as the artisan of ordinary skill will appreciate, this dosage will vary according to the tissue site of injection. The appropriate and effective dosage of nucleic acid sequence can readily be determined by those of ordinary skill in the art and may depend on the condition being treated and the route of administration. The preferred route of administration is by the parenteral route of injection into the interstitial space of tissues. However, other parenteral routes may also be used, such as, inhalation of an aerosol formulation particularly for delivery to lungs or bronchial tissues, throat or mucous membranes of the nose. In addition, naked polynucleotide constructs can be delivered to arteries during angioplasty by the catheter used in the procedure.

[1028] The dose response effects of injected polynucleotide in muscle in vivo is determined as follows. Suitable template DNA for production of mRNA coding for polypeptide of the present invention is prepared in accordance with a standard recombinant DNA methodology. The template DNA, which may be either circular or linear, is either used as naked DNA or complexed with liposomes. The quadriceps muscles of mice are then injected with various amounts of the template DNA.

[1029] Five to six week old female and male Balb/C mice are anesthetized by intraperitoneal injection with 0.3 ml of 2.5% Avertin. A 1.5 cm incision is made on the anterior thigh, and the quadriceps muscle is directly visualized. The template DNA is injected in 0.1 ml of carrier in a 1 cc syringe through a 27 gauge needle over one minute, approximately 0.5 cm from the distal insertion site of the muscle into the knee and about 0.2 cm deep. A suture is placed over the injection site for future localization, and the skin is closed with stainless steel clips.

[1030] After an appropriate incubation time (e.g., 7 days) muscle extracts are prepared by excising the entire quadriceps. Every fifth 15 um cross-section of the individual quadriceps muscles is histochemically stained for protein expression. A time course for protein expression may be done in a similar fashion except that quadriceps from different mice are harvested at different times. Persistence of DNA in muscle following injection may be determined by Southern blot analysis after preparing total cellular DNA and HIRT supernatants from injected and control mice. The results of the above experimentation in mice can be used to extrapolate proper dosages and other treatment parameters in humans and other animals using naked DNA.

### Example 19

### Transgenic Animals

[1031] The polypeptides of the invention can also be expressed in transgenic animals. Animals of any species, including, but not limited to, mice, rats, rabbits, hamsters, guinea pigs, pigs, micro-pigs, goats, sheep, cows and non-human primates, e.g., baboons, monkeys, and chimpanzees may be used to generate transgenic animals. In a specific embodiment, techniques described herein or otherwise known in the art, are used to express polypeptides of the invention in humans, as part of a gene therapy protocol.

[1032] Any technique known in the art may be used to introduce the transgene (i.e., polynucleotides of the invention) into animals to produce the founder lines of transgenic animals. Such techniques include, but are not limited to, pronuclear microinjection (Paterson et al., Appl. Microbiol. Biotechnol. 40:691-698 (1994); Carver et al., Biotechnology (NY) 11:1263-1270 (1993); Wright et al., Biotechnology (NY) 9:830-834 (1991); and Hoppe et al., U.S. Pat. No. 4,873,191 (1989)); retrovirus mediated gene transfer into germ lines (Van der Putten et al., Proc. Natl. Acad.;Sci., USA 82:6148-6152 (1985)), blastocysts or embryos; gene targeting in embryonic stem cells (Thompson et al., Cell 56:313-321 (1989)); electroporation of cells or embryos (Lo, 1983, Mol Cell. Biol. 3:1803-1814 (1983)); introduction of the polynucleotides of the invention using a gene gun (see, e.g., Ulmer et al., Science 259:1745 (1993); introducing nucleic acid constructs into embryonic pleuripotent stem cells and transferring the stem cells back into the blastocyst; and sperm-mediated gene transfer (Lavitrano et al., Cell 57:717-723 (1989); etc. -For a review of such techniques, see Gordon, “Transgenic Animals,” Intl. Rev. Cytol. 115:171-229 (1989), which is incorporated by reference herein in its entirety.

[1033] Any technique known in the art may be used to produce transgenic clones containing polynucleotides of the invention, for example, nuclear transfer into enucleated oocytes of nuclei from cultured embryonic, fetal, or adult cells induced to quiescence (Campell et al., Nature 380:64-66 (1996); Wilmut et al., Nature 385:810-813 (1997)).

[1034] The present invention provides for transgenic animals that carry the transgene in all their cells, as well as animals-which carry the transgene in some, but not all their cells, i.e., mosaic animals or chimeric. The transgene may be integrated as a single transgene or as multiple copies such as in concatamers, e.g., head-to-head tandems or head-to-tail tandems. The transgene may also be selectively introduced into and activated in a particular cell type by following, for example, the teaching of Lasko et al. (Lasko et al., Proc. Natl. Acad. Sci. USA 89:6232-6236 (1992)). The regulatory sequences required for such a cell-type specific activation will depend upon the particular cell type of interest, and will be apparent to those of skill in the art. When it is desired that the polynucleotide transgene be integrated into the chromosomal site of the endogenous gene, gene targeting is preferred. Briefly, when such a technique is to be utilized, vectors containing some nucleotide sequences homologous to the endogenous gene are designed for the purpose of integrating, via homologous recombination with chromosomal sequences, into and disrupting the function of the nucleotide sequence of the endogenous gene. The transgene may also be selectively introduced into a particular cell type, thus inactivating the endogenous gene in only that cell type, by following, for example, the teaching of Gu et al. (Gu et al., Science 265:103-106 (1994)). The regulatory sequences required for such a cell-type specific inactivation will depend upon the particular cell type of interest, and will be apparent to those of skill in the art.

[1035] Once transgenic animals have been generated, the expression of the recombinant gene may be assayed utilizing standard techniques. Initial screening may be accomplished by Southern blot analysis or PCR techniques to analyze animal tissues to verify that integration of the transgene has taken place. The level of mRNA expression of the transgene in the tissues of the transgenic animals may also be assessed using techniques which include, but are not limited to, Northern blot analysis of tissue samples obtained from the animal, in situ hybridization analysis, and reverse transcriptase-PCR (rt-PCR). Samples of transgenic gene-expressing tissue may also be evaluated immunocytochemically or immunohistochemically using antibodies specific for the transgene product.

[1036] Once the founder animals are produced, they may be bred, inbred, outbred, or crossbred to produce colonies of the particular animal. Examples of such breeding strategies include, but are not limited to: outbreeding of founder animals with more than one integration site in order to establish separate lines; inbreeding of separate lines in order to produce compound transgenics that express the transgene at higher levels because of the effects of additive expression of each transgene; crossing of heterozygous transgenic animals to produce animals homozygous for a given integration site in order to both augment expression and eliminate the need for screening of animals by DNA analysis; crossing of separate homozygous lines to produce compound heterozygous or homozygous lines; and breeding to place the transgene on a distinct background that is appropriate for an experimental model of interest.

[1037] Transgenic animals of the invention have uses which include, but are not limited to, animal model systems useful in elaborating the biological function of polypeptides of the present invention, studying conditions and/or disorders associated with aberrant expression, and in screening for compounds effective in ameliorating such conditions and/or disorders.

### Example 20

### Knock-Out Animals

[1038] Endogenous gene expression can also be reduced by inactivating or “knocking out” the gene and/or its promoter using targeted homologous recombination. (See e.g., Smithies et al., Nature 317:230-234 (1985); Thomas & Capecchi, Cell 51:503-512 (1987); Thompson et al., Cell 5:313-321 (1989); each of which is incorporated by reference herein in its entirety.) For example, a mutant, non-functional polynucleotide of the invention (or a completely unrelated DNA sequence) flanked by DNA homologous to the endogenous polynucleotide sequence (either the coding regions or regulatory regions of the gene) can be used, with or without a selectable marker and/or a negative selectable marker, to transfect cells that express polypeptides of the invention in vivo. In another embodiment, techniques known in the art are used to generate knockouts in cells that contain, but do not express the gene of interest. Insertion of the DNA construct, via targeted homologous recombination, results in inactivation of the targeted gene. Such approaches are particularly suited in research and agricultural fields where modifications to embryonic stem cells can be used to generate animal offspring with an inactive targeted gene (e.g., see Thomas & Capecchi 1987 and Thompson 1989, supra). However this approach can be routinely adapted for use in humans provided the recombinant DNA constructs are directly administered or targeted to the required site in vivo using appropriate viral vectors that will be apparent to those of skill in the art.

[1039] In further embodiments of the invention, cells that are genetically engineered to express the polypeptides of the invention, or alternatively, that are genetically engineered not to express the polypeptides of the invention (e.g., knockouts) are administered to a patient in vivo. Such cells may be obtained from the patient (i.e., animal, including human) or an MHC compatible donor and can include, but are not limited to fibroblasts, bone marrow cells, blood cells (e.g., lymphocytes), adipocytes, muscle cells, endothelial cells etc. The cells are genetically engineered in vitro using recombinant DNA techniques to introduce the coding sequence of polypeptides of the invention into the cells, or alternatively, to disrupt the coding sequence and/or endogenous regulatory sequence associated with the polypeptides of the invention, e.g., by transduction (using viral vectors, and preferably vectors that integrate the transgene into the cell genome) or transfection procedures, including, but not limited to, the use of plasmids, cosmids, YACs, naked DNA, electroporation, liposomes, etc. The coding sequence of the polypeptides of the invention can be placed under the control of a strong constitutive or inducible promoter or promoter/enhancer to achieve expression, and preferably secretion, of the polypeptides of the invention. The engineered cells which express and preferably secrete the polypeptides of the invention can be introduced into the patient systemically, e.g., in the circulation, or intraperitoneally.

[1040] Alternatively, the cells can be incorporated into a matrix and implanted in the body, e.g., genetically engineered fibroblasts can be implanted as part of a skin graft; genetically engineered endothelial cells can be implanted as part of a lymphatic or vascular graft. (See, for example, Anderson et al. U.S. Pat. No. 5,399,349; and Mulligan & Wilson, U.S. Pat. No. 5,460,959 each of which is incorporated by reference herein in its entirety).

[1041] When the cells to be administered are non-autologous or non-MHC compatible cells, they can be administered using well known techniques which prevent the development of a host immune response against the introduced cells. For example, the cells may be introduced in an encapsulated form which, while allowing for an exchange of components with the immediate extracellular environment, does not allow the introduced cells to be recognized by the host immune system.

[1042] Transgenic and “knock-out” animals of the invention have uses which include, but are not limited to, animal model systems useful in elaborating the biological function of polypeptides of the present invention, studying conditions and/or disorders associated with aberrant expression, and in screening for compounds effective in ameliorating such conditions and/or disorders.

### Example 21

### Assays Detecting Stimulation or Inhibition of B cell Proliferation and Differentiation

[1043] Generation of functional humoral immune responses requires both soluble and cognate signaling between B-lineage cells and their microenvironment. Signals may impart a positive stimulus that allows a B-lineage cell to continue its programmed development, or a negative stimulus that instructs the cell to arrest its current developmental pathway. To date, numerous stimulatory and inhibitory signals have been found to influence B cell responsiveness including IL-2, IL-4, IL-5, IL-6, IL-7, IL10, IL-13, IL-14 and IL-15. Interestingly, these signals are by themselves weak effectors but can, in combination with various co-stimulatory proteins, induce activation, proliferation, differentiation, homing, tolerance and death among B cell populations.

[1044] One of the best studied classes of B-cell co-stimulatory proteins is the TNF-superfamily. Within this family CD40, CD27, and CD30 along with their respective ligands CD154, CD70, and CD 153 have been found to regulate a variety of immune responses. Assays which allow for the detection and/or observation of the proliferation and differentiation of these B-cell populations and their precursors are valuable tools in determining the effects various proteins may have on these B-cell populations in terms of proliferation and differentiation. Listed below are two assays designed to allow for the detection of the differentiation, proliferation, or inhibition of B-cell populations and their precursors.

[1045] In vitro Assay—Agonists or antagonists of the invention can be assessed for its ability to induce activation, proliferation, differentiation or inhibition and/or death in B-cell populations and their precursors. The activity of the agonists or antagonists of the invention on purified human tonsillar B cells, measured qualitatively over the dose range from 0.1 to 10,000 ng/mL, is assessed in a standard B-lymphocyte co-stimulation assay in which purified tonsillar B cells are cultured in the presence of either formalin-fixed Staphylococcus aureus Cowan I (SAC) or immobilized anti-human IgM antibody as the priming agent. Second signals such as IL-2 and IL-15 synergize with SAC and IgM crosslinking to elicit B cell proliferation as measured by tritiated-thymidine incorporation. Novel synergizing agents can be readily identified using this assay. The assay involves isolating human tonsillar B cells by magnetic bead (MACS) depletion of CD3-positive cells. The resulting cell population is greater than 95% B cells as assessed by expression of CD45R(B220).

[1046] Various dilutions of each sample are placed into individual wells of a 96-well plate to which are added 10⁵ B-cells suspended in culture medium (RPMI 1640 containing 10% FBS, 5×10⁻⁵ M 2ME, 100 U/ml penicillin, 10 ug/ml streptomycin, and 10-5 dilution of SAC) in a total volume of 150 ul. Proliferation or inhibition is quantitated by a 20 h pulse (1 uCi/well) with 3H-thymidine (6.7 Ci/mM) beginning 72 h post factor addition. The positive and negative controls are IL2 and medium respectively.

[1047] In vivo Assay—BALB/c mice are injected (i.p.) twice per day with buffer only, or 2 mg/Kg of agonists or antagonists of the invention, or truncated forms thereof. Mice receive this treatment for 4 consecutive days, at which time they are sacrificed and various tissues and serum collected for analyses. Comparison of H&E sections from normal spleens and spleens treated with agonists or antagonists of the invention identify the results of the activity of the agonists or antagonists on spleen cells, such as the diffusion of peri-arterial lymphatic sheaths, and/or significant increases in the nucleated cellularity of the red pulp regions, which may indicate the activation of the differentiation and proliferation of B-cell populations. Immunohistochemical studies using a B cell marker, anti-CD45R(B220), are used to determine whether any physiological changes to splenic cells, such as splenic disorganization, are due to increased B-cell representation within loosely defined B-cell zones that infiltrate established T-cell regions.

[1048] Flow cytometric analyses of the spleens from mice treated with agonist or antagonist is used to indicate whether the agonists or antagonists specifically increases the proportion of ThB+, CD45R(B220)dull B cells over that which is observed in control mice.

[1049] Likewise, a predicted consequence of increased mature B-cell representation in vivo is a relative increase in serum Ig titers. Accordingly, serum IgM and IgA levels are compared between buffer and agonists or antagonists-treated mice.

[1050] The studies described in this example tested activity of agonists or antagonists of the invention. However, one skilled in the art could easily modify the exemplified studies to test the activity of polynucleotides or polypeptides of the invention (e.g., gene therapy).

### Example 22

### T Cell Proliferation Assay

[1051] A CD3-induced proliferation assay is performed on PBMCs and is measured by the uptake of ³H-thymidine. The assay is performed as follows. Ninety-six well plates are coated with 100 μl/well of mAb to CD3 (HIT3a, Pharmingen) or isotype-matched control mAb (B33.1) overnight at 4 degrees C. (1 μg/ml in 0.05M bicarbonate buffer, pH 9.5), then washed three times with PBS. PBMC are isolated by F/H gradient centrifugation from human peripheral blood and added to quadruplicate wells (5×10⁴/well) of mAb coated plates in RPMI containing 10% FCS and P/S in the presence of varying concentrations of agonists or antagonists of the invention (total volume 200 ul). Relevant protein buffer and medium alone are controls. After 48 hr. culture at 37 degrees C., plates are spun for 2 min. at 1000 rpm and 100 μl of supernatant is removed and stored −20 degrees C. for measurement of IL-2 (or other cytokines) if effect on proliferation is observed. Wells are supplemented with 100 ul of medium containing 0.5 uCi of ³H-thymidine and cultured at 37 degrees C. for 18-24 hr. Wells are harvested and incorporation of ³H-thymidine used as a measure of proliferation. Anti-CD3 alone is the positive control for proliferation. IL-2 (100 U/ml) is also used as a control which enhances proliferation. Control antibody which does not induce proliferation of T cells is used as the negative control for the effects of agonists or antagonists of the invention.

[1052] The studies described in this example tested activity of agonists or antagonists of the invention. However, one skilled in the art could easily modify the exemplified studies to test the activity of polynucleotides or polypeptides of the invention (e.g., gene therapy).

### Example 23

### Effect of Agonists or Antagonists of the Invention on the Expression of MHC Class II, Costimulatory and Adhesion Molecules and Cell Differentiation of Monocytes and Monocyte-Derived Human Dendritic Cells

[1053] Dendritic cells are generated by the expansion of proliferating precursors found in the peripheral blood: adherent PBMC or elutriated monocytic fractions are cultured for 7-10 days with GM-CSF (50 ng/ml) and IL-4 (20 ng/ml). These dendritic cells have the characteristic phenotype of immature cells (expression of CD1, CD80, CD86, CD40 and MHC class II antigens). Treatment with activating factors, such as TNF-α, causes a rapid change in surface phenotype (increased expression of MHC class I and II, costimulatory and adhesion molecules, downregulation of FCγRII, upregulation of CD83). These changes correlate with increased antigen-presenting capacity and with functional maturation of the dendritic cells.

[1054] FACS analysis of surface antigens is performed as follows. Cells are treated 1-3 days with increasing concentrations of agonist or antagonist of the invention or LPS (positive control), washed with PBS containing 1% BSA and 0.02 mM sodium azide, and then incubated with 1:20 dilution of appropriate FITC- or PE-labeled monoclonal antibodies for 30 minutes at 4 degrees C. After an additional wash, the labeled cells are analyzed by flow cytometry on a FACScan (Becton Dickinson).

[1055] Effect on the production of cytokines. Cytokines generated by dendritic cells, in particular IL-12, are important in the initiation of T-cell dependent immune responses. IL-12 strongly influences the development of Thl helper T-cell immune response, and induces cytotoxic T and NK cell function. An ELISA is used to measure the IL-12 release as follows. Dendritic cells (10⁶/ml) are treated with increasing concentrations of agonists or antagonists of the invention for 24 hours. LPS (100 ng/ml) is added to the cell culture as positive control. Supernatants from the cell cultures are then collected and analyzed for IL-12 content using commercial ELISA kit (e.g., R & D Systems (Minneapolis, Minn.)). The standard protocols provided with the kits are used.

[1056] Effect on the expression of MHC Class II. costimulatory and adhesion molecules. Three major families of cell surface antigens can be identified on monocytes: adhesion molecules, molecules involved in antigen presentation, and Fc receptor. Modulation of the expression of MHC class II antigens and other costimulatory molecules, such as B7 and ICAM-1, may result in changes in the antigen presenting capacity of monocytes and ability to induce T cell activation. Increased expression of Fc receptors may correlate with improved monocyte cytotoxic activity, cytokine release and phagocytosis.

[1057] FACS analysis is used to examine the surface antigens as follows. Monocytes are treated 1-5 days with increasing concentrations of agonists or antagonists of the invention or LPS (positive control), washed with PBS containing 1% BSA and 0.02 mM sodium azide, and then incubated with 1:20 dilution of appropriate FITC- or PE-labeled monoclonal antibodies for 30 minutes at 4 degrees C. After an additional wash, the labeled cells are analyzed by flow cytometry on a FACScan (Becton Dickinson).

[1058] Monocyte activation and/or increased survival. Assays for molecules that activate (or alternatively, inactivate) monocytes and/or increase monocyte survival (or alternatively, decrease monocyte survival) are known in the art and may routinely be applied to determine whether a molecule of the invention functions as an inhibitor or activator of monocytes. Agonists or antagonists of the invention can be screened using the three assays described below. For each of these assays, Peripheral blood mononuclear cells (PBMC) are purified from single donor leukopacks (American Red Cross, Baltimore, Md.) by centrifugation through a Histopaque gradient (Sigma). Monocytes are isolated from PBMC by counterflow centrifugal elutriation.

[1059] Monocyte Survival Assay. Human peripheral blood monocytes progressively lose viability when cultured in absence of serum or other stimuli. Their death results from internally regulated processes (apoptosis). Addition to the culture of activating factors, such as TNF-alpha dramatically improves cell survival-and prevents DNA fragmentation. Propidium iodide (PI) staining is used to measure apoptosis as follows. Monocytes are cultured for 48 hours in polypropylene tubes in serum-free medium (positive control), in the presence of 100 ng/ml TNF-alpha (negative control), and in the presence of varying concentrations of the compound to be tested. Cells are suspended at a concentration of 2×10⁶/ml in PBS containing PI at a final concentration of 5 tg/ml, and then incubated at room temperature for 5 minutes before FACScan analysis. PI uptake has been demonstrated to correlate with DNA fragmentation in this experimental paradigm.

[1060] Effect on cytokine release. An important function of monocytes/macrophages is their regulatory activity on other cellular populations of the immune system through the release of cytokines after stimulation. An ELISA to measure cytokine release is performed as follows. Human monocytes are incubated at a density of 5×10⁵ cells/ml with increasing concentrations of agonists or antagonists of the invention and under the same conditions, but in the absence of agonists or antagonists. For IL-12 production, the cells are primed overnight with IFN (100 U/ml) in the presence of agonist or antagonist of the invention. LPS (10 ng/ml) is then added. Conditioned media are collected after 24 h and kept frozen until use. Measurement of TNF-alpha, IL-10, MCP-1 and IL-8 is then performed using a commercially available ELISA kit (e.g., R & D Systems (Minneapolis, Minn.)) and applying the standard protocols provided with the kit.

[1061] Oxidative burst. Purified monocytes are plated in 96-w plate at 2-1×10⁵ cell/well. Increasing concentrations of agonists or antagonists of the invention are added to the wells in a total volume of 0.2 ml culture medium (RPMI 1640+10% FCS, glutamine and antibiotics). After 3 days incubation, the plates are centrifuged and the medium is removed from the wells. To the macrophage monolayers, 0.2 ml per well of phenol red solution (140 mM NaCl, 10 mM potassium phosphate buffer pH 7.0, 5.5 mM dextrose, 0.56 mM phenol red and 19 U/ml of HRPO) is added, together with the stimulant (200 nM PMA). The plates are incubated at 37° C. for 2 hours and the reaction is stopped by adding 20 μl 1N NaOH per well. The absorbance is read at 610 nm. To calculate the amount of H₂O₂ produced by the macrophages, a standard curve of a H₂O₂ solution of known molarity is performed for each experiment.

[1062] The studies described in this example tested activity of agonists or antagonists of the invention. However, one skilled in the art could easily modify the exemplified studies to test the activity of polynucleotides or polypeptides of the invention (e.g., gene therapy).

### Example 24

### Biological Effects of Agonists or Antagonists of the Invention

### Astrocyte and Neuronal Assays

[1063] Agonists or antagonists of the invention, expressed in Escherichia coli and purified as described above, can be tested for activity in promoting the survival, neurite outgrowth, or phenotypic differentiation of cortical neuronal cells and for inducing the proliferation of glial fibrillary acidic protein immunopositive cells, astrocytes. The selection of cortical cells for the bioassay is based on the prevalent expression of FGF-1 and FGF-2 in cortical structures and on the previously reported enhancement of cortical neuronal survival resulting from FGF-2 treatment. A thymidine incorporation assay, for example, can be used to elucidate an agonist or antagonist of the invention's activity on these cells.

[1064] Moreover, previous reports describing the biological effects of FGF-2 (basic FGF) on cortical or hippocampal neurons in vitro have demonstrated increases in both neuron survival and neurite outgrowth (Walicke et al., “Fibroblast growth factor promotes survival of dissociated hippocampal neurons and enhances neurite extension.” Proc. Natl. Acad. Sci. USA 83:3012-3016. (1986), assay herein incorporated by reference in its entirety). However, reports from experiments done on PC-12 cells suggest that these two responses are not necessarily synonymous and may depend on not only which FGF is being tested but also on which receptor(s) are expressed on the target cells. Using the primary cortical neuronal culture paradigm, the ability of an agonist or antagonist of the invention to induce neurite outgrowth can be compared to the response achieved with FGF-2 using, for example, a thymidine incorporation assay.

### Fibroblast and endothelial cell assays

[1065] Human lung fibroblasts are obtained from Clonetics (San Diego, Calif.) and maintained in growth media from Clonetics. Dermal microvascular endothelial cells are obtained from Cell Applications (San Diego, Calif.). For proliferation assays, the human lung fibroblasts and dermal microvascular endothelial cells can be cultured at 5,000 cells/well in a 96-well plate for one day in growth medium. The cells are then incubated for one day in 0.1% BSA basal medium. After replacing the medium with fresh 0.1% BSA medium, the cells are incubated with the test proteins for 3 days. Alamar Blue (Alamar Biosciences, Sacramento, Calif.) is added to each well to a final concentration of 10%. The cells are incubated for 4 hr. Cell viability is measured by reading in a CytoFluor fluorescence reader. For the PGE₂ assays, the human lung fibroblasts are cultured at 5,000 cells/well in a 96-well plate for one day. After a medium change to 0.1% BSA basal medium, the cells are incubated with FGF-2 or agonists or antagonists of the invention with or without IL-1α for 24 hours. The supernatants are collected and assayed for PGE₂ by EIA kit (Cayman, Ann Arbor, Mich.). For the IL-6 assays, the human lung fibroblasts are cultured at 5,000 cells/well in a 96-well plate for one day. After a medium change to 0.1% BSA basal medium, the cells are incubated with FGF-2 or with or without agonists or antagonists of the invention IL-1α for 24 hours. The supernatants are collected and assayed for IL-6 by ELISA kit (Endogen, Cambridge, Mass.).

[1066] Human lung fibroblasts are cultured with FGF-2 or agonists or antagonists of the invention for 3 days in basal medium before the addition of Alamar Blue to assess effects on growth of the fibroblasts. FGF-2 should show a stimulation at 10-2500 ng/ml which can be used to compare stimulation with agonists or antagonists of the invention.

### Parkinson Models.

[1067] The loss of motor function in Parkinson's disease is attributed to a deficiency of striatal dopamine resulting from the degeneration of the nigrostriatal dopaminergic projection neurons. An animal model for Parkinson's that has been extensively characterized involves the systemic administration of 1-methyl-4 phenyl 1,2,3,6-tetrahydropyridine (MPTP). In the CNS, MPTP is taken-up by astrocytes and catabolized by monoamine oxidase B to 1-methyl-4-phenyl pyridine (MPP⁺) and released. Subsequently, MPP⁺ is actively accumulated in dopaminergic neurons by the high-affinity reuptake transporter for dopamine. MPP+is then concentrated in mitochondria by the electrochemical gradient and selectively inhibits nicotidamide adenine disphosphate: ubiquinone oxidoreductionase (complex I), thereby interfering with electron transport and eventually generating oxygen radicals.

[1068] It has been demonstrated in tissue culture paradigms that FGF-2 (basic FGF) has trophic activity towards nigral dopaminergic neurons (Ferrari et al., Dev. Biol. 1989). Recently, Dr. Unsicker's group has demonstrated that administering FGF-2 in gel foam implants in the striatum results in the near complete protection of nigral dopaminergic neurons from the toxicity associated with MPTP exposure (Otto and Unsicker, J. Neuroscience, 1990).

[1069] Based on the data with FGF-2, agonists or antagonists of the invention can be evaluated to determine whether it has an action similar to that of FGF-2 in enhancing dopaminergic neuronal survival in vitro and it can also be tested in vivo for protection of dopaminergic neurons in the striatum from the damage associated with MPTP treatment. The potential effect of an agonist or antagonist of the invention is first examined in vitro in a dopaminergic neuronal cell culture paradigm. The cultures are prepared by dissecting the midbrain floor plate from gestation day 14 Wistar rat embryos. The tissue is dissociated with trypsin and seeded at a density of 200,000 cells/cm² on polyorthinine-laminin coated glass coverslips. The cells are maintained in Dulbecco's Modified Eagle's medium and F12 medium containing hormonal supplements (N1). The cultures are fixed with paraformaldehyde after 8 days in vitro and are processed for tyrosine hydroxylase, a specific marker for dopaminergic neurons, immunohistochemical staining. Dissociated cell cultures are prepared from embryonic rats. The culture medium is changed every third day and the factors are also added at that time.

[1070] Since the dopaminergic neurons are isolated from animals at gestation day 14, a developmental time which is past the stage when the dopaminergic precursor cells are proliferating, an increase in the number of tyrosine hydroxylase immunopositive neurons would represent an increase in the number of dopaminergic neurons surviving in vitro. Therefore, if an agonist or antagonist of the invention acts to prolong the survival of dopaminergic neurons, it would suggest that the agonist or antagonist may be involved in Parkinson's Disease.

[1071] The studies described in this example tested activity of agonists or antagonists of the invention. However, one skilled in the art could easily modify the exemplified studies to test the activity of polynucleotides or polypeptides of the invention (e.g., gene therapy).

### Example 25

### The Effect of Agonists or Antagonists of the Invention on the Growth of Vascular Endothelial Cells

[1072] On day 1, human umbilical vein endothelial cells (HUVEC) are seeded at 2-5×10⁴ cells/35 mm dish density in M199 medium containing 4% fetal bovine serum (FBS), 16 units/ml heparin, and 50 units/ml endothelial cell growth supplements (ECGS, Biotechnique, Inc.). Onday 2, the medium is replaced with M199 containing 10% FBS, 8 units/ml heparin. An agonist or antagonist of the invention, and positive controls, such as VEGF and basic FGF (bFGF) are added, at varying concentrations. On days 4 and 6, the medium is replaced. On day 8, cell number is determined with a Coulter Counter.

[1073] An increase in the number of HUVEC cells indicates that the compound of the invention may proliferate vascular endothelial cells, while a decrease in the number of HUVEC cells indicates that the compound of the invention inhibits vascular endothelial cells.

[1074] The studies described in this example tested activity of a polypeptide of the invention. However, one skilled in the art could easily modify the exemplified studies to test the activity of polynucleotides (e.g., gene therapy), agonists, and/or antagonists of the invention.

### Example 26

### Rat Corneal Wound Healing Model

[1075] This animal model shows the effect of an agonist or antagonist of the invention on neovascularization. The experimental protocol includes:

[1076] Making a 1-1.5 mm long incision from the center of cornea into the stromal layer.

[1077] Inserting a spatula below the lip of the incision facing the outer corner of the eye.

[1078] Making a pocket (its base is 1-1.5 mm form the edge of the eye).

[1079] Positioning a pellet, containing 50 ng-5 ug of an agonist or antagonist of the invention, within the pocket.

[1080] Treatment with an agonist or antagonist of the invention can also be applied topically to the corneal wounds in a dosage range of 20 mg -500 mg (daily treatment for five days).

[1081] The studies described in this example tested activity of agonists or antagonists of the invention. However, one skilled in the art could easily modify the exemplified studies to test the activity of polynucleotides or polypeptides of the invention (e.g., gene therapy).

### Example 27

### Diabetic Mouse and Glucocorticoid-Impaired Wound Healing Models

### Diabetic db+/db+ Mouse Model

[1082] To demonstrate that an agonist or antagonist of the invention accelerates the healing process, the genetically diabetic mouse model of wound healing is used. The full thickness wound healing model in the db+/db+ mouse is a well characterized, clinically relevant and reproducible model of impaired wound healing. Healing of the diabetic wound is dependent on formation of granulation tissue and re-epithelialization rather than contraction (Gartner, M. H. et al., J. Surg. Res. 52:389 (1992); Greenhalgh, D. G. et al, Am. J. Pathol. 136:1235 (1990)).

[1083] The diabetic animals have many of the characteristic features observed in Type II diabetes mellitus. Homozygous (db+/db+) mice are obese in comparison to their normal heterozygous (db+/+m) littermates. Mutant diabetic (db+/db+) mice have a single autosomal recessive mutation on chromosome 4 (db+) (Coleman et al. Proc. Natl. Acad. Sci. USA 77:283-293 (1982)). Animals show polyphagia, polydipsia and polyuria. Mutant diabetic mice (db+/db+) have elevated blood glucose, increased or normal insulin levels, and suppressed cell-mediated immunity (Mandel et al., J. Immunol. 120:1375 (1978); Debray-Sachs, M. et al., Clin. Exp. Immunol. 5(1():1-7 (1983); Leiter et al., Am. J. of Pathol. 114:46-55 (1985)). Peripheral neuropathy, myocardial complications, and microvascular lesions, basement membrane thickening and glomerular filtration abnormalities have been described in these animals (Norido, F. et al., Exp. Neurol. 83(2):221-232 (1984); Robertson et al., Diabetes 29(1):60-67 (1980); Giacomelli et al., Lab Invest. 40(4):460-473 (1979); Coleman, D. L., Diabetes 31 (Suppl):1-6 (1982)). These homozygous diabetic mice develop hyperglycemia that is resistant to insulin analogous to human type II diabetes (Mandel et al., J. Immunol. 120:1375-1377 (1978)).

[1084] The characteristics observed in these animals suggests that healing in this model may be similar to the healing observed in human diabetes (Greenhalgh, et al., Am. J. of Pathol 136:1235-1246 (1990)).

[1085] Genetically diabetic female C57BL/KsJ (db+/db+) mice and their non-diabetic (db+/+m) heterozygous littermates are used in this study (Jackson Laboratories). The animals are purchased at 6 weeks of age and are 8 weeks old at the beginning of the study. Animals are individually housed and received food and water ad libitum. All manipulations are performed using aseptic techniques. The experiments are conducted according to the rules and guidelines of Human Genome Sciences, Inc. Institutional Animal Care and Use Committee and the Guidelines for the Care and Use of Laboratory Animals.

[1086] Wounding protocol is performed according to previously reported methods (Tsuboi, R. and Rifkin, D. B., J. Exp. Med. 172:245-251 (1990)). Briefly, on the day of wounding, animals are anesthetized with an intraperitoneal injection of Avertin (0.01 mg/mL), 2,2,2-tribromoethanol and 2-methyl-2-butanol dissolved in deionized water. The dorsal region of the animal is shaved and the skin washed with 70% ethanol solution and iodine. The surgical area is dried with sterile gauze prior to wounding. An 8 mm full-thickness wound is then created using a Keyes tissue punch. Immediately following wounding, the surrounding skin is gently stretched to eliminate wound expansion. The wounds are left open for the duration of the experiment. Application of the treatment is given topically for 5 consecutive days commencing on the day of wounding. Prior to treatment, wounds are gently cleansed with sterile saline and gauze sponges.

[1087] Wounds are visually examined and photographed at a fixed distance at the day of surgery and at two day intervals thereafter. Wound closure is determined by daily measurement on days 1-5 and on day 8. Wounds are measured horizontally and vertically using a calibrated Jameson caliper. Wounds are considered healed if granulation tissue is no longer visible and the wound is covered by a continuous epithelium.

[1088] An agonist or antagonist of the invention is administered using at a range different doses, from 4 mg to 500 mg per wound per day for 8 days in vehicle. Vehicle control groups received 50 mL of vehicle solution.

[1089] Animals are euthanized on day 8 with an intraperitoneal injection of sodium pentobarbital (300 mg/kg). The wounds and surrounding skin are then harvested for histology and immunohistochemistry. Tissue specimens are placed in 10% neutral buffered formalin in tissue cassettes between biopsy sponges for further processing.

[1090] Three groups of 10 animals each (5 diabetic and 5 non-diabetic controls) are evaluated: 1) Vehicle placebo control, 2) untreated group, and 3) treated group.

[1091] Wound closure is analyzed by measuring the area in the vertical and horizontal axis and obtaining the total square area of the wound. Contraction is then estimated by establishing the differences between the initial wound area (day 0) and that of post treatment (day 8). The wound area on day 1 is 64 mm², the corresponding size of the dermal punch. Calculations are made using the following formula:

[Open area on day 8]−[Open area on day 1]/[Open area on day 1]

[1092] Specimens are fixed in 10% buffered formalin and paraffin embedded blocks are sectioned perpendicular to the wound. surface (5 mm) and cut using a Reichert-Jung microtome. Routine hematoxylin-eosin (H&E) staining is performed on cross-sections of bisected wounds. Histologic examination of the wounds are used to assess whether the healing process and the morphologic appearance of the repaired skin is altered by treatment with an agonist or antagonist of the invention. This assessment included verification of the presence of cell accumulation, inflammatory cells, capillaries, fibroblasts, re-epithelialization and epidermal maturity (Greenhalgh, D. G. et al., Am. J. Pathol. 136:1235 (1990)). A calibrated lens micrometer is used by a blinded observer.

[1093] Tissue sections are also stained immunohistochemically with a polyclonal rabbit anti-human keratin antibody using ABC Elite detection system. Human skin is used as a positive tissue control while non-immune IgG is used as a negative control. Keratinocyte growth is determined by evaluating the extent of reepithelialization of the wound using a calibrated lens micrometer.

[1094] Proliferating cell nuclear antigen/cyclin (PCNA) in skin specimens is demonstrated by using anti-PCNA antibody (1:50) with an ABC Elite detection system. Human colon cancer served as a positive tissue control and human brain tissue is used as a negative tissue control. Each specimen included a section with omission of the primary antibody and substitution with non-immune mouse IgG. Ranking of these sections is based on the extent of proliferation on a scale of 0-8, the lower side of the scale reflecting slight proliferation to the higher side reflecting intense proliferation.

[1095] Experimental data are analyzed using an unpaired t test. A p value of <0.05 is considered significant.

### Steroid Impaired Rat Model

[1096] The inhibition of wound healing by steroids has been well documented in various in vitro and in vivo systems (Wahl, Glucocorticoids and Wound healing. In: Anti-Inflammatory Steroid Action: Basic and Clinical Aspects. 280-302 (1989); Wahlet al., J. Immunol. 115: 476-481 (1975); Werb et al., J. Exp. Med. 147:1684-1694 (1978)). Glucocorticoids retard wound healing by inhibiting angiogenesis, decreasing vascular permeability (Ebert et al., An. Intern. Med. 37:701-705 (1952)), fibroblast proliferation, and collagen synthesis (Beck et al., Growth Factors. 5: 295-304 (1991); Haynes et al, J. Clin. Invest. 61: 703-797 (1978)) and producing a transient reduction of circulating monocytes (Haynes et al., J. Clin. Invest. 61: 703-797 (1978); Wahl, “Glucocorticoids and wound healing”, In: Antiinflammatory Steroid Action: Basic and Clinical Aspects, Academic Press, New York, pp. 280-302 (1989)). The systemic administration of steroids to impaired wound healing is a well establish phenomenon in rats (Beck et al., Growth Factors. 5: 295-304 (1991); Haynes et al., J. Clin. Invest. 61: 703-797 (1978); Wahl, “Glucocorticoids and wound healing”, In: Antiinflammatory Steroid Action: Basic and Clinical Aspects, Academic Press, New York, pp. 280-302 (1989); Pierce et al., Proc. Natl Acad. Sci. USA 86: 2229-2233 (1989)).

[1097] To demonstrate that an agonist or antagonist of the invention can accelerate the healing process, the effects of multiple topical applications of the agonist or antagonist on full thickness excisional skin wounds in rats in which healing has been impaired by the systemic administration of methylprednisolone is assessed.

[1098] Young adult male Sprague Dawley rats weighing 250-300 g (Charles River Laboratories) are used in this example. The animals are purchased at 8 weeks of age and are 9 weeks old at the beginning of the study. The healing response of rats is impaired by the systemic administration of methylprednisolone (17 mg/kg/rat intramuscularly) at the time of wounding. Animals are individually housed and received food and water ad libitum. All manipulations are performed using aseptic techniques. This study is conducted according to the rules and guidelines of Human Genome Sciences, Inc. Institutional Animal Care and Use Committee and the Guidelines for the Care and Use of Laboratory Animals.

[1099] The wounding protocol is followed according to section A, above. On the day of wounding, animals are anesthetized with an intramuscular injection of ketamine (50 mg/kg) and xylazine (5 mg/kg). The dorsal region of the animal is shaved and the skin washed with 70% ethanol and iodine solutions. The surgical area is dried with sterile gauze prior to wounding. An 8 mm full-thickness wound is created using a Keyes tissue punch. The wounds are left open for the duration of the experiment. Applications of the testing materials are given topically once a day for 7 consecutive days commencing on the day of wounding and subsequent to methylprednisolone administration. Prior to treatment, wounds are gently cleansed with sterile saline and gauze sponges.

[1100] Wounds are visually examined and photographed at a fixed distance at the day of wounding and at the end of treatment. Wound closure is determined by daily measurement on days 1-5 and on day 8. Wounds are measured horizontally and vertically using a calibrated Jameson caliper. Wounds are considered healed if granulation tissue is no longer visible and the wound is covered by a continuous epithelium.

[1101] The agonist or antagonist of the invention is administered using at a range different doses, from 4 mg to 500 mg per wound per day for 8 days in vehicle. Vehicle control groups received 50 mL of vehicle solution.

[1102] Animals are euthanized on day 8 with an intraperitoneal injection of sodium pentobarbital (300 mg/kg). The wounds and surrounding skin are then harvested for histology. Tissue specimens are placed in 10% neutral buffered formalin in tissue cassettes between biopsy sponges for further processing.

[1103] Three groups of 10 animals each (5 with methylprednisolone and 5 without glucocorticoid) are evaluated: 1) Untreated group 2). Vehicle placebo control 3) treated groups.

[1104] Wound closure is analyzed by measuring the area in the vertical and horizontal axis and obtaining the total area of the wound. Closure is then estimated by establishing the differences between the initial wound area (day 0) and that of post treatment (day 8). The wound area on day 1 is 64 mm , the corresponding size of the dermal punch. Calculations are made using the following formula:

[Open area on day 8]−[Open area on day 1]/[Open area on day 1]

[1105] Specimens are fixed in 10% buffered formalin and paraffin embedded blocks are sectioned perpendicular to the wound surface (5 mm) and cut using an Olympus microtome. Routine hematoxylin-eosin (H&E) staining is performed on cross-sections of bisected wounds. Histologic examination of the wounds allows assessment of whether the healing process and the morphologic appearance of the repaired skin is improved by treatment with an agonist or antagonist of the invention. A calibrated lens micrometer is used by a blinded observer to determine the distance of the wound gap.

[1106] Experimental data are analyzed using an unpaired t test. A p value of <0.05 is considered significant.

[1107] The studies described in this example tested activity of agonists or antagonists of the invention. However, one skilled in the art could easily modify the exemplified studies to test the activity of polynucleotides or polypeptides of the invention (e.g., gene therapy).

### Example 28

### Lymphadema Animal Model

[1108] The purpose of this experimental approach is to create an appropriate and consistent lymphedema model for testing the therapeutic effects of an agonist or antagonist of the invention in lymphangiogenesis and re-establishment of the lymphatic circulatory system in the rat hind limb. Effectiveness is measured by swelling volume of the affected limb, quantification of the amount of lymphatic vasculature, total blood plasma protein, and histopathology. Acute lymphedema is observed for 7-10 days. Perhaps more importantly, the chronic progress of the edema is followed for up to 3-4 weeks.

[1109] Prior to beginning surgery, blood sample is drawn for protein concentration analysis. Male rats weighing approximately ˜350 g are dosed with Pentobarbital. Subsequently, the right legs are shaved from knee to hip. The shaved area is swabbed with gauze soaked in 70% EtOH. Blood is drawn for serum total protein testing. Circumference and volumetric measurements are made prior to injecting dye into paws after marking 2 measurement levels (0.5 cm above heel, at mid-pt of dorsal paw). The intradermal dorsum of both right and left paws are injected with 0.05 ml of 1% Evan's Blue. Circumference and volumetric measurements are then made following injection of dye into paws.

[1110] Using the knee joint as a landmark, a mid-leg inguinal incision is made circumferentially allowing the femoral vessels to be located. Forceps and hemostats are used to dissect and separate the skin flaps. After locating the femoral vessels, the lymphatic vessel that runs along side and underneath the vessel(s) is located. The main lymphatic vessels in this area are then electrically coagulated or suture ligated.

[1111] Using a microscope, muscles in back of the leg (near the semitendinosis and adductors) are bluntly dissected. The popliteal lymph node is then located. The 2 proximal and 2 distal lymphatic vessels and distal blood supply of the popliteal node are then ligated by suturing. The popliteal lymph node, and any accompanying adipose tissue, is then removed by cutting connective tissues.

[1112] Care is taken to control any mild bleeding resulting from this procedure. After lymphatics are occluded, the skin flaps are sealed by using liquid skin (Vetbond) (AJ Buck). The separated skin edges are sealed to the underlying muscle tissue while leaving a gap of ˜0.5 cm around the leg. Skin also may be anchored by suturing to underlying muscle when necessary.

[1113] To avoid infection, animals are housed individually with mesh (no bedding). Recovering animals are checked daily through the optimal edematous peak, which typically occurred by day 5-7. The plateau edematous peak are then observed. To evaluate the intensity of the lymphedema, the circumference and volumes of 2 designated places on each paw before operation and daily for 7 days are measured. The effect of plasma proteins on lymphedema is determined and whether protein analysis is a useful testing perimeter is also investigated. The weights of both control and edematous limbs are evaluated at 2 places. Analysis is performed in a blind manner.

[1114] Circumference Measurements: Under brief gas anesthetic to prevent limb movement, a cloth tape is used to measure limb circumference. Measurements are done at the ankle bone and dorsal paw by 2 different people and those 2 readings are averaged. Readings are taken from both control and edematous limbs.

[1115] Volumetric Measurements: On the day of surgery, animals are anesthetized with Pentobarbital and are tested prior to surgery. For daily volumetrics animals are under brief halothane anesthetic (rapid immobilization and quick recovery), and both legs are shaved and equally marked using waterproof marker on legs. Legs are first dipped in water, then dipped into instrument to each marked level, then measured by Buxco edema software(Chen/Victor). Data is recorded by one person, while the other is dipping the limb to marked area.

[1116] Blood-plasma protein measurements: Blood is drawn, spun, and serum separated prior to surgery and then at conclusion for total protein and Ca²⁺comparison.

[1117] Limb Weight Comparison: After drawing blood, the animal is prepared for tissue collection. The limbs are amputated using a quillitine, then both experimental and control legs are cut at the ligature and weighed. A second weighing is done as the tibio-cacaneal joint is disarticulated and the foot is weighed.

[1118] Histological Preparations: The transverse muscle located behind the knee (popliteal) area is dissected and arranged in a metal mold, filled with freezeGel, dipped into cold methylbutane, placed into labeled sample bags at −80EC until sectioning. Upon sectioning, the muscle is observed under fluorescent microscopy for lymphatics.

[1119] The studies described in this example tested activity of agonists or antagonists of the invention. However, one skilled in the art could easily modify the exemplified studies to test the activity of polynucleotides or polypeptides of the invention (e.g., gene therapy).

### Example 29

### Suppression of TNF Alpha-induced Adhesion Molecule Expression by a Agonist or Antagonist of the Invention

[1120] The recruitment of lymphocytes to areas of inflammation and angiogenesis involves specific receptor-ligand interactions between cell surface adhesion molecules (CAMs) on lymphocytes and the vascular endothelium. The adhesion process, in both normal and pathological settings, follows a multi-step cascade that involves intercellular adhesion molecule-1 (ICAM-1), vascular cell adhesion molecule-1 (VCAM-1), and endothelial leukocyte adhesion molecule-1 (E-selectin) expression on endothelial cells (EC). The expression of these molecules and others on the vascular endothelium determines the efficiency with which leukocytes may adhere to the local vasculature and extravasate into the local tissue during the development of an inflammatory response. The local concentration of cytokines and growth factor participate in the modulation of the expression of these CAMs.

[1121] Tumor necrosis factor alpha (TNF-a), a potent proinflammatory cytokine, is a stimulator of all three CAMs on endothelial cells and may be involved in a wide variety of inflammatory responses, often resulting in a pathological outcome.

[1122] The potential of an agonist or antagonist of the invention to mediate a suppression of TNF-a induced CAM expression can be examined. A modified ELISA assay which uses ECs as a solid phase absorbent is employed to measure the amount of CAM expression on TNF-a treated ECs when co-stimulated with a member of the FGF family of proteins.

[1123] To perform the experiment, human umbilical vein endothelial cell (HUVEC) cultures are obtained from pooled cord harvests and maintained in growth medium (EGM-2; Clonetics, San Diego, Calif.) supplemented with 10% FCS and 1% penicillin/streptomycin in a 37 degree C. humidified incubator containing 5% C02. HUVECs are seeded in 96-well plates at concentrations of 1×10⁴ cells/well in EGM medium at 37 degree C. for 18-24 hrs or until confluent. The monolayers are subsequently washed 3 times with a serum-free solution of RPMI-1640 supplemented with 100 U/ml penicillin and 100 mg/ml streptomycin, and treated with a given cytokine and/or growth factor(s) for 24 h at 37 degree C. Following incubation, the cells are then evaluated for CAM expression.

[1124] Human Umbilical Vein Endothelial cells (HUVECs) are grown in a standard 96 well plate to confluence. Growth medium is removed from the cells and replaced with 90 ul of 199 Medium (10% FBS). Samples for testing and positive or negative controls are added to the plate in triplicate (in 10 ul volumes). Plates are incubated at 37 degree C. for either 5 h (selectin and integrin expression) or 24 h (integrin expression only). Plates are aspirated to remove medium and 100 μl of 0.1% paraformaldehyde-PBS(with Ca++ and Mg++) is added to each well. Plates are held at 4° C. for 30 min.

[1125] Fixative is then removed from the wells and wells are washed 1× with PBS(+Ca,Mg)+0.5% BSA and drained. Do not allow the wells to dry. Add 10 μl of diluted primary antibody to the test and control wells. Anti-ICAM-1-Biotin, Anti-VCAM-1-Biotin and Anti-E-selectin-Biotin are used at a concentration of 10 μg/ml (1:10 dilution of 0.1 mg/ml stock antibody). Cells are incubated at 37° C. for 30 min. in a humidified environment. Wells are washed X3 with PBS(+Ca,Mg)+0.5% BSA.

[1126] Then add 20 μl of diluted ExtrAvidin-Alkaline Phosphotase (1:5,000 dilution) to each well and incubated at 37° C. for 30 min. Wells are washed X3 with PBS(+Ca,Mg)+0.5% BSA. 1 tablet of p-Nitrophenol Phosphate pNPP is dissolved in 5 ml of glycine buffer (pH 10.4). 100 μl of pNPP substrate in glycine buffer is added to each test well. Standard wells in triplicate are prepared from the working dilution of the ExtrAvidin-Alkaline Phosphotase in glycine buffer: 1:5,000 (10⁰)>10^{-0.5}>10⁻¹>10^{-0.5}0.5 μl of each dilution is added to triplicate wells and the resulting AP content in each well is 5.50 ng, 1.74 ng, 0.55 ng, 0.18 ng. 100 μl of pNNP reagent must then be added to each of the standard wells. The plate must be incubated at 37° C. for 4 h. A volume of 50 μl of 3M NaOH is added to all wells. The results are quantified on a plate reader at 405 nm. The background subtraction option is used on blank wells filled with glycine buffer only. The template is set up to indicate the concentration of AP-conjugate in each standard well [5.50 ng; 1.74 ng; 0.55 ng; 0.18 ng]. Results are indicated as amount of bound AP-conjugate in each sample.

[1127] The studies described in this example tested activity of agonists or antagonists of the invention. However, one skilled in the art could easily modify the exemplified studies to test the activity of polynucleotides or polypeptides of the invention (e.g., gene therapy).

### Example 30

### Production of Polypeptide of the Invention For High-Throughput Screening Assays

[1128] The following protocol produces a supernatant containing polypeptide of the present invention to be tested. This supernatant can then be used in the Screening Assays described in Examples 32-41.

[1129] First, dilute Poly-D-Lysine (644 587 Boehringer-Mannheim) stock solution (1 mg/ml in PBS) 1:20 in PBS (w/o calcium or magnesium 17-516F Biowhittaker) for a working solution of 50 ug/ml. Add 200 ul of this solution to each well (24 well plates) and incubate at RT for 20 minutes. Be sure to distribute the solution over each well (note: a 12-channel pipetter may be used with tips on every other channel). Aspirate off the Poly-D-Lysine solution and rinse with 1 ml PBS (Phosphate Buffered Saline). The PBS should remain in the well until just prior to plating the cells and plates may be poly-lysine coated in advance for up to two weeks.

[1130] Plate 293T cells (do not carry cells past P+20) at 2×10⁵ cells/well in 0.5 ml DMEM(Dulbecco's Modified Eagle Medium)(with 4.5 G/L glucose and L-glutamine (12-604F Biowhittaker))/10% heat inactivated FBS(14-503F Biowhittaker)/1×Penstrep(17-602E Biowhittaker). Let the cells grow overnight.

[1131] The next day, mix together in a sterile solution basin: 300 ul Lipofectamine (18324-012 Gibco/BRL) and 5 ml Optimem 1 (31985070 Gibco/BRL)/96-well plate. With a small volume multi-channel pipetter, aliquot approximately 2ug of an expression vector containing a polynucleotide insert, produced by the methods described in Examples 8-10, into an appropriately labeled 96-well round-bottom plate. With a multi-channel pipetter, add 50 ul of the Lipofectamine/Optimem I mixture to each well. Pipette up and down gently to mix. Incubate at RT 15-45 minutes. After about 20 minutes, use a multi-channel pipetter to add 150 ul Optimem I to each well. As a control, one plate of vector DNA lacking an insert should be transfected with each set of transfections.

[1132] Preferably, the transfection should be performed by tag-teaming the following tasks. By tag-teaming, hands on time is cut in half, and the cells do not spend too much time on PBS. First, person A aspirates off the media from four 24-well plates of cells, and then person B rinses each well with 0.5-1 ml PBS. Person A then aspirates off PBS rinse, and person B, using a12-channel pipetter with tips on every other channel, adds the 200 ul of DNA/Lipofectamine/Optimem I complex to the odd wells first, then to the even wells, to each row on the 24-well plates. Incubate at 37 degree C. for 6 hours.

[1133] While cells are incubating, prepare appropriate media, either 1% BSA in DMEM with 1×penstrep, or HGS CHO-5 media (116.6 mg/L of CaCl2 (anhyd); 0.00130 mg/L CuSO₄-5H₂O; 0.050 mg/L of Fe(NO₃)₃-9H₂O; 0.417 mg/L of FeSO₄-7H₂O; 311.80 mg/L of Kcl; 28.64 mg/L of MgCl₂; 48.84 mg/L of MgSO₄; 6995.50 mg/L of NaCl; 2400.0 mg/L of NaHCO₃; 62.50 mg/L of NaH₂PO₄-H₂O; 71.02 mg/L of Na₂HPO4; 0.4320 mg/L of ZnSO₄-7H₂O; 0.002 mg/L of Arachidonic Acid; 1.022 mg/L of Cholesterol; 0.070 mg/L of DL-alpha-Tocopherol-Acetate; 0.0520 mg/L of Linoleic-Acid; 0.010 mg/L of Linolenic Acid; 0.010 mg/L of Myristic Acid; 0.010 mg/L of Oleic Acid; 0.010 mg/L of Palmitric Acid; 0.010 mg/L of Palmitic Acid; 100 mg/L of Pluronic F-68; 0.010 mg/L of Stearic Acid; 2.20 mg/L of Tween 80; 4551 mg/L of D-Glucose; 130.85 mg/ml of L- Alanine; 147.50 mg/ml of L-Arginine-HCL; 7.50 mg/ml of L-Asparagine-H₂O; 6.65 mg/ml of L-Aspartic Acid; 29.56 mg/ml of L-Cystine-2HCL-H₂O; 31.29 mg/ml of L-Cystine-2HCL; 7.35 mg/ml of L-Glutamic Acid; 365.0 mg/ml of L-Glutamine; 18.75 mg/ml of Glycine; 52.48 mg/ml of L-Histidine-HCL-H₂O; 106.97 mg/ml of L-Isoleucine; 111.45 mg/ml-of L-Leucine; 163.75 mg/ml of L-Lysine HCL; 32.34 mg/ml of L-Methionine; 68.48 mg/ml of L-Phenylalainine; 40.0 mg/ml of L-Proline; 26.25 mg/ml of L-Serine; 101.05 mg/ml of L-Threonine; 19.22 mg/ml of L-Tryptophan; 91.79 mg/ml of L-Tryrosine-2Na-2H₂O; and 99.65 mg/ml of L-Valine; 0.0035 mg/L of Biotin; 3.24 mg/L of D-Ca Pantothenate; 11.78 mg/L of Choline Chloride; 4.65 mg/L of Folic Acid; 15.60 mg/L of i-Inositol; 3.02 mg/L of Niacinamide; 3.00 mg/L of Pyridoxal HCL; 0.031 mg/L of Pyridoxine HCL; 0.3f9 mg/L of Riboflavin; 3.17 mg/L of Thiamine HCL; 0.365 mg/L of Thymidine; 0.680 mg/L of Vitamin B₁₂; 25 mM of HEPES Buffer; 2.39 mg/L of Na Hypoxanthine; 0.105 mg/L of Lipoic Acid; 0.081 mg/L of Sodium Putrescine-2HCL; 55.0 mg/L of Sodium Pyruvate; 0.0067 mg/L of Sodium Selenite; 20 uM of Ethanolamine; 0.122 mg/L of Ferric Citrate; 41.70 mg/L of Methyl-B-Cyclodextrin complexed with Linoleic Acid; 33.33 mg/L of Methyl-B-Cyclodextrin complexed with Oleic Acid; 10 mg/L of Methyl-B-Cyclodextrin complexed with Retinal Acetate. Adjust osmolarity to 327 mOsm) with 2 mm glutamine and 1×penstrep. (BSA (81-068-3 Bayer) 100 gm dissolved in 1L DMEM for a 10% BSA stock solution). Filter the media and collect 50 ul for endotoxin assay in 15 ml polystyrene conical.

[1134] The transfection reaction is terminated, preferably by tag-teaming, at the end of the incubation period. Person A aspirates off the transfection media, while person B adds 1.5 ml appropriate media to each well. Incubate at 37 degree C. for 45 or 72 hours depending on the media used: 1% BSA for 45 hours or CHO-5 for 72 hours.

[1135] On day four, using a 300 ul multichannel pipetter, aliquot 600 ul in one 1 ml deep well plate and the remaining supernatant into a 2 ml deep well. The supernatants from each well can then be used in the assays described in Examples 32-39.

[1136] It is specifically understood that when activity is obtained in any of the assays described below using a supernatant, the activity originates from either the polypeptide of the present invention directly (e.g., as a secreted protein) or by polypeptide of the present invention inducing expression of other proteins, which are then secreted into the supernatant. Thus, the invention further provides a method of identifying the protein in the supernatant characterized by an activity in a particular assay.

### Example 31

### Construction of GAS Reporter Construct

[1137] One signal transduction pathway involved in the differentiation and proliferation of cells is called the Jaks-STATs pathway. Activated proteins in the Jaks-STATs pathway bind to gamma activation site “GAS” elements or interferon-sensitive responsive element (“ISRE”), located in the promoter of many genes. The binding of a protein to these elements alter the expression of the associated gene.

[1138] GAS and ISRE elements are recognized by a class of transcription factors called Signal Transducers and Activators of Transcription, or “STATs.” There are six members of the STATs family. Stat1 and Stat3 are present in many cell types, as is Stat2 (as response to IFN-alpha is widespread). Stat4 is more restricted and is not in many cell types though it has been found in T helper class I, cells after treatment with IL-12. Stat5 was originally called mammary growth factor, but has been found at higher concentrations in other cells including myeloid cells. It can be activated in tissue culture cells by many cytokines.

[1139] The STATs are activated to translocate from the cytoplasm to the nucleus upon tyrosine phosphorylation by a set of kinases known as the Janus Kinase (“Jaks”) family. Jaks represent a distinct family of soluble tyrosine kinases and include Tyk2, Jak1, Jak2, and Jak3. These kinases display significant sequence similarity and are generally catalytically inactive in resting cells.

[1140] The Jaks are activated by a wide range of receptors summarized in the Table below. (Adapted from review by Schidler and Darnell, Ann. Rev. Biochem. 64:621-51 (1995).) A cytokine receptor family, capable of activating Jaks, is divided into two groups: (a) Class 1 includes receptors for IL-2, IL-3, JL-4, JL-6, IL-7, IL-9, IL-11, IL-12, IL-i5, Epo, PRL, GH, G-CSF, G-M-CSF, LIF, CNTF, and thrombopoietin; and (b) Class 2 includes IFN-a, IFN-g, and IL-10. The Class 1 receptors share a conserved cysteine motif (a set of four conserved cysteines and one tryptophan) and a WSXWS motif (a membrane proximal region encoding Trp-Ser-Xaa-Trp-Ser (SEQ ID NO:2)).

[1141] Thus, on binding of a ligand to a receptor, Jaks are activated, which in turn activate STATs, which then translocate and bind to GAS elements. This entire process is encompassed in the Jaks-STATs signal transduction pathway.

[1142] Therefore, activation of the Jaks-STATs pathway, reflected by the binding of the GAS or the ISRE element, can be used to indicate proteins involved in the proliferation and differentiation of cells. For example, growth factors and cytokines are known to activate the Jaks-STATs pathway. (See Table below.) Thus, by using GAS elements linked to reporter molecules, activators of the Jaks-STATs pathway can be identified.

| | | | GAS | | | | |
|---|---|---|---|---|---|---|---|
| JAKs | | STATS | (elements) or ISRE | | | | |
| Ligand | | tyk2 | Jak1 | Jak2 | Jak3 | | |
| IFN family | | | | | | | |
| IFN-a/B | + | + | − | − | 1,2,3 | | ISRE |
| IFN-g | | | + | + | − | 1 | GAS (IRF1 > Lys6 > IFP) |
| I1-10 | | + | ? | ? | − | 1,3 | |
| gp130 family | | | | | | | |
| IL-6 (Pleiotropic) | + | + | + | ? | 1,3 | | GAS (IRF1 > Lys6 > IFP) |
| I1-11 (Pleiotropic) | ? | + | ? | ? | 1,3 | | |
| OnM (Pleiotropic) | ? | + | + | ? | 1,3 | | |
| LIF (Pleiotropic) | ? | + | + | ? | 1,3 | | |
| CNTF (Pleiotropic) | | −/+ | + | + | ? | 1,3 | |
| G-CSF (Pleiotropic) | | ? | + | ? | ? | 1,3 | |
| IL-12 (Pleiotropic) | | + | − | + | + | 1,3 | |
| g-C family | | | | | | | |
| IL-2 (lymphocytes) | | − | + | − | + | 1,3,5 | GAS |
| IL-4 (lymph/myeloid) | | − | + | − | + | 6 | GAS (IRF1 = IFP >> Ly6)(IgH) |
| IL-7 (lymphocytes) | | − | + | − | + | 5 | GAS |
| IL-9 (lymphocytes) | | − | + | − | + | 5 | GAS |
| IL-13 (lymphocyte) | | − | + | ? | ? | 6 | GAS |
| IL-15 | | ? | + | ? | + | 5 | GAS |
| gp140 family | | | | | | | |
| IL-3 (myeloid) | | − | − | + | − | 5 | GAS (IRF1 > IFP >> Ly6) |
| IL-5 (myeloid) | | − | − | + | − | 5 | GAS |
| GM-CSF (myeloid) | | − | − | + | − | 5 | GAS |
| Growth hormone family | | | | | | | |
| GH | | ? | − | + | − | 5 | |
| PRL | | ? | +/− | + | − | 1,3,5 | |
| EPO | | ? | − | + | − | 5 | GAS (B-CAS > IRF1 = IFP >> Ly6) |
| Receptor Tyrosine Kinases | | | | | | | |
| EGF | | ? | + | + | − | 1,3 | GAS (IRF1) |
| PDGF | | ? | + | + | − | 1,3 | |
| CSF-1 | | ? | + | + | − | 1,3 | GAS (not IRF1) |

[1143] To construct a synthetic GAS containing promoter element, which is used in the Biological Assays described in Examples 32-33, a PCR based strategy is employed to generate a GAS-SV40 promoter sequence. The 5′ primer contains four tandem copies of the GAS binding site found in the IRF1 promoter and previously demonstrated to bind STATs upon induction with a range of cytokines (Rothman et al., Immunity 1:457-468 (1994).), although other GAS or ISRE elements can be used instead. The 5′ primer also contains 18 bp of sequence complementary to the SV40 early promoter sequence and is flanked with an XhoI site. The sequence of the 5′ primer is:

| 5′:GCGCCTCGAGATTTCCCCGAAATCTAGATTTCCC | (SEQ ID NO:3) |
|---|---|
| CGAAATGATTTCCCCGAAATGATTTCCCCGAAATATC | |
| TGCCATCTCAATTAG:3′ | |

[1144] The downstream primer is complementary to the SV40 promoter and is flanked with a Hind III site: 5′:GCGGCAAGCTTTTTGCAAAGCCTAGGC:3′(SEQ ID NO: 4)

[1145] PCR amplification is performed using the SV40 promoter template present in the B-gal:promoter plasmid obtained from Clontech. The resulting PCR fragment is digested with XhoI/Hind III and subcloned into BLSK2-. (Stratagene.) Sequencing with forward and reverse primers confirms that the insert contains the following sequence:

| 5′:CTCGAGATTTCCCCGAAATCTAGATTTCCCCGAA | (SEQ ID NO:5) |
|---|---|
| ATGATTTCCCCGAAATGATTTCCCCGAAATATCTGCC | |
| ATCTCAATTAGTCAGCAACCATAGTCCCGCCCCTAAC | |
| TCCGCCCATCCCGCCCCTAACTCCGCCCAGTTCCGCC | |
| CATTCTCCGCCCCATGGCTGACTAATTTTTTTTATTT | |
| ATGCAGAGGCCGAGGCCGCCTCGGCCTCTGAGCTATT | |
| CCAGAAGTAGTGAGGAGGCTTTTTTGGAGGCCTAGGC | |
| TTTTGCAAAAAGCTT:3′ | |

[1146] With this GAS promoter element linked to the SV40 promoter, a GAS:SEAP2 reporter construct is next engineered. Here, the reporter molecule is a secreted alkaline phosphatase, or “SEAP.” Clearly, however, any reporter molecule can be used instead of SEAP, in this or in any of the other Examples. Well known reporter molecules that can be used instead of SEAP include chloramphenicol acetyltransferase (CAT), luciferase, alkaline phosphatase, B-galactosidase, green fluorescent protein (GFP), or any protein detectable by an antibody.

[1147] The above sequence confirmed synthetic GAS-SV40 promoter element is subcloned into the pSEAP-Promoter vector obtained from Clontech using HindII and XhoI, effectively replacing the SV40 promoter with the amplified GAS:SV40 promoter element, to create the GAS-SEAP vector. However, this vector does not contain a neomycin resistance gene, and therefore, is not preferred for mammalian expression systems.

[1148] Thus, in order to generate mammalian stable cell lines expressing the GAS-SEAP reporter, the GAS-SEAP cassette is removed from the GAS-SEAP vector using SalI and NotI, and inserted into a backbone vector containing the neomycin resistance gene, such as pGFP-1 (Clontech), using these restriction sites in the multiple cloning site, to create the GAS-SEAP/Neo vector. Once this vector is transfected into mammalian cells, this vector can then be used as a reporter molecule for GAS binding as described in Examples 32-33.

[1149] Other-constructs can be made using the above description and replacing GAS with a different promoter sequence. For example, construction of reporter molecules containing NFK-B and EGR promoter sequences are described in Examples 34 and 35. However, many other promoters can be substituted using the protocols described in these Examples. For instance, SRE, IL-2, NFAT, or Osteocalcin promoters can be substituted, alone or in combination (e.g., GASJNF-KB/EGR, GAS/NF-KB, I1-2/NFAT, or NF-KB/GAS). Similarly, other cell lines can be used to test reporter construct activity, such as HELA (epithelial), HUVEC (endothelial), Reh (B-cell), Saos-2 (osteoblast), HUWAC (aortic), or Cardiomyocyte.

### Example 32

### High-Throughput Screening Assay for T-cell Activity.

[1150] The following protocol is used to assess T-cell activity by identifying factors, and determining whether supernate containing a polypeptide of the invention proliferates and/or differentiates T-cells. T-cell activity is assessed using the GAS/SEAP/Neo construct produced in Example 31. Thus, factors that increase SEAP activity indicate the ability to activate the Jaks-STATS signal transduction pathway. The T-cell used in this assay is Jurkat T-cells (ATCC Accession No. TIB-152), although Molt-3 cells (ATCC Accession No. CRL-1552) and Molt-4 cells (ATCC Accession No. CRL-1582) cells can also be used.

[1151] Jurkat T-cells are lymphoblastic CD4+Thl helper cells. In order to generate stable cell lines, approximately 2 million Jurkat cells are transfected with the GAS-SEAP/neo vector using DMRIE-C (Life Technologies)(transfection procedure described below). The transfected cells are seeded to a density of approximately 20,000 cells per well and transfectants resistant to 1 mg/ml genticin selected. Resistant colonies are expanded and then tested for their response to increasing concentrations of interferon gamma. The dose response of a selected clone is demonstrated.

[1152] Specifically, the following protocol will yield sufficient cells for 75 wells containing 200 ul of cells. Thus, it is either scaled up, or performed in multiple to generate sufficient cells for multiple 96 well plates. Jurkat cells are maintained in RPMI+10% serum with l%Pen-Strep. Combine 2.5 mls of OPTI-MEM (Life Technologies) with 10 ug of plasmid DNA in a T25 flask. Add 2.5 ml OPTI-MEM containing 50 ul of DMRIE-C and incubate at room temperature for 15-45 mins.

[1153] During the incubation period, count cell concentration, spin down the required number of cells (10⁷ per transfection), and resuspend in OPTI-MEM to a final concentration of 10⁷ cells/ml. Then add 1 ml of 1×10⁷ cells in OPTI-MEM to T25 flask and incubate at 37 degree C. for 6 hrs. After the incubation, add 10 ml of RPMI+15% serum.

[1154] The Jurkat:GAS-SEAP stable reporter lines are maintained in RPMI +10% serum, 1 mg/ml Genticin, and 1% Pen-Strep. These cells are treated with supernatants containing polypeptide of the present invention or polypeptide of the present invention induced polypeptides as produced by the protocol described in Example 30.

[1155] On the day of treatment with the supernatant, the cells should be washed and resuspended in fresh RPMI+10% serum to a density of 500,000 cells per ml. The exact number of cells required will depend on the number of supernatants being screened. For one 96 well plate, approximately 10 million cells (for 10 plates, 100 million cells) are required.

[1156] Transfer the cells to a triangular reservoir boat, in order to dispense the cells into a 96 well dish, using a 12 channel pipette. Using a 12 channel pipette, transfer 200 ul of cells into each well (therefore adding 100,000 cells per well).

[1157] After all the plates have been seeded, 50 ul of the supernatants are transferred directly from the 96 well plate-containing the supernatants into each well using a 12 channel pipette. In addition, a dose of exogenous interferon gamma (0.1, 1.0, 10 ng) is added to wells H9, H10, and H11 to serve as additional positive controls for the assay.

[1158] The 96 well dishes containing Jurkat cells treated with supernatants are placed in an incubator for 48 hrs (note: this time is variable between 48-72 hrs). 35 ul samples from each well are then transferred to an opaque 96 well plate using a 12 channel pipette. The opaque plates should be covered (using sellophene covers) and stored at −20 degree C. until SEAP assays are performed according to Example 36. The plates containing the remaining treated cells are placed at 4 degree C. and serve as a source of material for repeating the assay on a specific well if desired.

[1159] As a positive control, 100 Unit/ml interferon gamma can be used which is known to activate Jurkat T cells. Over 30 fold induction is typically observed in the positive control wells.

[1160] The above protocol may be used in the generation of both transient, as well as stable, transfected cells, which would be apparent to those of skill in the art.

### Example 33

### High-Throughput Screening Assay Identifying Myeloid Activity

[1161] The following protocol is used to assess myeloid activity of polypeptide of the present invention by determining whether polypeptide of the present invention proliferates and/or differentiates myeloid cells. Myeloid cell activity is assessed using the GAS/SEAP/Neo construct produced in Example 31. Thus, factors that increase SEAP activity indicate the ability to activate the Jaks-STATS signal transduction pathway. The myeloid cell used in this assay is U937, a pre-monocyte cell line, although TF-1, HL60, or KG1 can be used.

[1162] To transiently transfect U937 cells with the GAS/SEAP/Neo construct produced in Example 31, a DEAE-Dextran method (Kharbanda et. al., 1994, Cell Growth & Differentiation, 5:259-265) is used. First, harvest 2×10⁷ U937 cells and wash with PBS. The U937 cells are usually grown in RPMI 1640 medium containing 10% heat-inactivated fetal bovine serum (FBS) supplemented with 100 units/ml penicillin and 100 mg/ml streptomycin.

[1163] Next, suspend the cells in 1 ml of 20 mM Tris-HCl (pH 7.4) buffer containing 0.5 mg/ml DEAE-Dextran, 8 ug GAS-SEAP2 plasmid DNA, 140 mM NaCl, 5 mM KCl, 375 uM Na₂HPO₄.7H₂O, 1 mM MgCl₂, and 675 uM CaCl₂. Incubate at 37 degrees C. for 45 min.

[1164] Wash the cells with RPMI 1640 medium containing 10% FBS and then resuspend in 10 ml complete medium and incubate at 37 degree C. for 36 hr.

[1165] The GAS-SEAP/U937 stable cells are obtained by growing the cells in 400 ug/ml G418. The G418-free medium is used for routine growth but every one to two months, the cells should be re-grown in 400 ug/ml G418 for couple of passages.

[1166] These cells are tested by harvesting 1×10⁸ cells (this is enough for ten 96-well plates assay) and wash with PBS. Suspend the cells in 200 ml above described growth medium, with a final density of 5×10⁵ cells/ml. Plate 200 ul cells per well in the 96-well plate (or 1×10⁵ cells/well).

[1167] Add 50 ul of the supernatant prepared by the protocol described in Example 30. Incubate at 37 degree C. for 48 to 72 hr. As a positive control, 100 Unit/ml interferon gamma can be used which is known to activate U937 cells. Over 30 fold induction is typically observed in the positive control wells. SEAP assay the supernatant according to the protocol described in Example 36.

### Example 34

### High-Throughput Screening Assay Identifying Neuronal Activity.

[1168] When cells undergo differentiation and proliferation, a group of genes are activated through many different signal transduction pathways. One of these genes, EGR1 (early growth response gene 1), is induced in various tissues and cell types upon activation. The promoter of EGR1 is responsible for such induction. Using the EGR1 promoter linked to reporter molecules, activation of cells can be assessed by polypeptide of the present invention.

[1169] Particularly, the following protocol is used to assess neuronal activity in PC12 cell lines. PC12 cells (rat phenochromocytoma cells) are known to proliferate and/or differentiate by activation with a number of mitogens, such as TPA (tetradecanoyl phorbol acetate), NGF (nerve growth factor), and EGF (epidermal growth factor). The EGR1 gene expression is activated during this treatment. Thus, by stably transfecting PC 12 cells with a construct containing an EGR promoter linked to SEAP reporter, activation of PC12 cells by polypeptide of the present invention can be assessed.

[1170] The EGR/SEAP reporter construct can be assembled by the following protocol. The EGR-1 promoter sequence (−633 to +1)(Sakamoto K et al., Oncogene 6:867-871 (1991)) can be PCR amplified from human genomic DNA using the following primers:

| | |
|---|---|
| 5′ GCGCTCGAGGGATGACAGCGATAGAACCCCGG-3′ | (SEQ ID NO:6) |
| 5′ GCGAAGCTTCGCGACTCCCCGGATCCGCCTC-3′ | (SEQ ID NO:7) |

[1171] Using the GAS:SEAP/Neo vector produced in Example 31, EGR1 amplified product can then be inserted into this vector. Linearize the GAS:SEAP/Neo vector using restriction enzymes XhoI/HindIII, removing the GAS/SV40 stuffer. Restrict the EGR1 amplified product with these same enzymes. Ligate the vector and the EGR1 promoter.

[1172] To prepare 96 well-plates for cell culture, two mls of a coating solution (1:30 dilution of collagen type I (Upstate Biotech Inc. Cat#08-115) in 30% ethanol (filter sterilized)) is added per one 10 cm plate or 50 ml per well of the 96-well plate, and allowed to air dry for 2 hr.

[1173] PC12 cells are routinely grown in RPMI-1640 medium (Bio Whittaker) containing 10% horse serum (JRH BIOSCIENCES, Cat. #12449-78P), 5% heat-inactivated fetal bovine serum (FBS) supplemented with 100 units/ml penicillin and 100 ug/ml streptomycin on a precoated 10 cm tissue culture dish. One to four split is done every three to four days. Cells are removed from the plates by scraping and resuspended with pipetting up and down for more than 15 times.

[1174] Transfect the EGR/SEAP/Neo construct into PC 12 using the Lipofectamine protocol described in Example 30. EGR-SEAP/PC12 stable cells are obtained by growing the cells in 300 ug/ml G418. The G418-free medium is used for routine growth but every one to two months, the cells should be re-grown in 300 ug/ml G418 for couple of passages.

[1175] To assay for neuronal activity, a 10 cm plate with cells around 70 to 80% confluent is screened by removing the old medium. Wash the cells once with PBS (Phosphate buffered saline). Then starve the cells in low serum medium (RPMI-1640 containing 1% horse serum and 0.5% FBS with antibiotics) overnight.

[1176] The next morning, remove the medium and wash the cells with PBS. Scrape off the cells from the plate, suspend the cells well in 2 ml low serum medium. Count the cell number and add more low serum medium to reach final cell density as 5×10⁵ cells/ml.

[1177] Add 200 ul of the cell suspension to each well of 96-well plate (equivalent to 1×10⁵ cells/well). Add 50 ul supernatant produced by Example 30, 37 degree C. for 48 to 72 hr. As a positive control, a growth factor known to activate PC12 cells through EGR can be used, such as 50 ng/ul of Neuronal Growth Factor (NGF). Over fifty-fold induction of SEAP is typically seen in the positive control wells. SEAP assay the supernatant according to Example 36.

### Example 35

### High-Throughput Screening Assay for T-cell Activity

[1178] NF-KB (Nuclear Factor KB) is a transcription factor activated by a wide variety of agents including the inflammatory cytokines IL-1 and TNF, CD30 and CD40, lymphotoxin-alpha and lymphotoxin-beta, by exposure to LPS or thrombin, and by expression of certain viral gene products. As a transcription factor, NF-KB regulates the expression of genes involved in immune cell activation, control of apoptosis (NF- KB appears to shield cells from apoptosis), B and T-cell development, anti-viral and antimicrobial responses, and multiple stress responses.

[1179] In non-stimulated conditions, NF- KB is retained in the cytoplasm with I-KB (Inhibitor KB). However, upon stimulation, I- KB is phosphorylated and degraded, causing NF- KB to shuttle to the nucleus, thereby activating transcription of target genes. Target genes activated by NF- KB include IL-2, IL-6, GM-CSF, ICAM-1 and class 1 MHC.

[1180] Due to its central role and ability to respond to a range of stimuli, reporter constructs utilizing- the NF-KB promoter element are used to screen the supernatants produced in Example 30. Activators or inhibitors of NF-KB would be useful in treating, preventing, and/or diagnosing diseases. For example, inhibitors of NF-KB could be used to treat those diseases related to the acute or chronic activation of NF-KB, such as rheumatoid arthritis.

[1181] To construct a vector containing the NF-KB promoter element, a PCR based strategy is employed. The upstream primer contains four tandem copies of the NF-KB binding site (GGGGACTTTCCC) (SEQ ID NO: 8), 18 bp of sequence complementary to the 5′ end of the SV40 early promoter sequence, and is flanked with an XhoI site:

| 5′:GCGGCCTCGAGGGGACTTTCCCGGGGACTTTCC | (SEQ ID NO:9) |
|---|---|
| GGGGACTTTCCGGGACTTTCCATCCTGCCATCTCAAT | |
| TAG:3′ | |

[1182] The downstream primer is complementary to the 3′ end of the SV40 promoter and is flanked with a Hind III site: 5′:GCGGCAAGCTTTTTGCAAAGCCTAGGC:3′(SEQ ID NO: 4)

[1183] PCR amplification is performed using the SV40 promoter template present in the pB-gal:promoter plasmid obtained from Clontech. The resulting PCR fragment is digested with XhoI and Hind III and subcloned into BLSK2-. (Stratagene) Sequencing with the T7 and T3 primers confirms the insert contains the following sequence:

| 5′:CTCGAGGGGACTTTCCCGGGGACTTTCCGGGGA | (SEQ ID NO:10) |
|---|---|
| CTTTCCGGGACTTTCCATCTGCCATCTCAATTAGTC | |
| AGCAACCATAGTCCCGCCCCTAACTCCGCCCATCCC | |
| GCCCCTAACTCCGCCCAGTTCCGCCCATTCTCCGCC | |
| CCATGGCTGACTAATTTTTTTTATTTATGCAGAGGC | |
| CGAGGCCGCCTCGGCCTCTGAGCTATTCCAGAAGTA | |
| GTGAGGAGGCTTTTTTGGAGGCCTAGGCTTTTGCAA | |
| AAAGCTT:3′ | |

[1184] Next, replace the SV40 minimal promoter element present in the pSEAP2-promoter plasmid (Clontech) with this NF-KB/SV40 fragment using Xhol and HindIII. However, this vector does not contain a neomycin resistance gene, and therefore, is not preferred for mammalian expression systems.

[1185] In order to generate stable mammalian cell lines, the NF-KB/SV40/SEAP cassette is removed from the above NF-KB/SEAP vector using restriction enzymes SalI and NotI, and inserted into a vector containing neomycin resistance. Particularly, the NF-KB/SV40/SEAP cassette was inserted into pGFP-1 (Clontech), replacing the GFP gene, after restricting pGFP-I with SalI and NotI.

[1186] Once NF-KB/SV40/SEAP/Neo vector is created, stable Jurkat T-cells are created and maintained according to the protocol described in Example 32. Similarly, the method for assaying supernatants with these stable Jurkat T-cells is also described in Example 32. As a positive control, exogenous TNF alpha (0.1,1, 10 ng) is added to wells H9, H10, and H 11, with a 5-10 fold activation typically observed.

### Example 36

### Assay for SEAP Activity

[1187] As a reporter molecule for the assays described in Examples 32-35, SEAP activity is assayed using the Tropix Phospho-light Kit (Cat. BP-400) according to the following general procedure. The Tropix Phospho-light Kit supplies the Dilution, Assay, and Reaction Buffers used below.

[1188] Prime a dispenser with the 2.5×Dilution Buffer and dispense 15 ul of 2.5×dilution buffer into Optiplates containing 35 ul of a supernatant. Seal the plates with a plastic sealer and incubate at 65 degree C. for 30 min. Separate the Optiplates to avoid uneven heating.

[1189] Cool the samples to room temperature for 15 minutes. Empty the dispenser and prime with the Assay Buffer. Add 50 ml Assay Buffer and incubate at room temperature 5 min. Empty the dispenser and prime with the Reaction Buffer (see the Table below). Add 50 ul Reaction Buffer and incubate at room temperature for 20 minutes. Since the intensity of the chemiluminescent signal is time dependent, and it takes about 10 minutes to read 5 plates on a luminometer, thus one should treat 5 plates at each time and start the second set 10 minutes later.

[1190] Read the relative light unit in the luminometer. Set H12 as blank, and print the results. An increase in chemiluminescence indicates reporter activity.

### Reaction Buffer Formulation:

[1191]

| # of plates | Rxn buffer diluent (ml) | CSPD (ml) |
|---|---|---|
| 10 | 60 | 3 |
| 11 | 65 | 3.25 |
| 12 | 70 | 3.5 |
| 13 | 75 | 3.75 |
| 14 | 80 | 4 |
| 15 | 85 | 4.25 |
| 16 | 90 | 4.5 |
| 17 | 95 | 4.75 |
| 18 | 100 | 5 |
| 19 | 105 | 5.25 |
| 20 | 110 | 5.5 |
| 21 | 115 | 5.75 |
| 22 | 120 | 6 |
| 23 | 125 | 6.25 |
| 24 | 130 | 6.5 |
| 25 | 135 | 6.75 |
| 26 | 140 | 7 |
| 27 | 145 | 7.25 |
| 28 | 150 | 7.5 |
| 29 | 155 | 7.75 |
| 30 | 160 | 8 |
| 31 | 165 | 8.25 |
| 32 | 170 | 8.5 |
| 33 | 175 | 8.75 |
| 34 | 180 | 9 |
| 35 | 185 | 9.25 |
| 36 | 190 | 9.5 |
| 37 | 195 | 9.75 |
| 38 | 200 | 10 |
| 39 | 205 | 10.25 |
| 40 | 210 | 10.5 |
| 41 | 215 | 10.75 |
| 42 | 220 | 11 |
| 43 | 225 | 11.25 |
| 44 | 230 | 11.5 |
| 45 | 235 | 11.75 |
| 46 | 240 | 12 |
| 47 | 245 | 12.25 |
| 48 | 250 | 12.5 |
| 49 | 255 | 12.75 |
| 50 | 260 | 13 |

### Example 37

### High-Throughput Screening Assay Identifying Changes in Small Molecule Concentration and Membrane Permeability

[1192] Binding of a ligand to a receptor is known to alter intracellular levels of small molecules, such as calcium, potassium, sodium, and pH, as well as alter membrane potential. These alterations can be measured in an assay to identify supernatants which bind to receptors of a particular cell. Although the following protocol describes an assay for calcium, this protocol can easily be modified to detect changes in potassium, sodium, pH, membrane potential, or any other small molecule which is detectable by a fluorescent probe.

[1193] The following assay uses Fluorometric Imaging Plate Reader (“FLIPR”) to measure changes in fluorescent molecules (Molecular Probes) that bind small molecules. Clearly, any fluorescent molecule detecting a small- molecule can be used instead of the calcium fluorescent molecule, fluo-4 (Molecular Probes, Inc.; catalog no. F-14202), used here.

[1194] For adherent cells, seed the cells at 10,000-20,000 cells/well in a Co-star black 96-well plate with clear bottom. The plate is incubated in a C0₂ incubator for 20 hours. The adherent cells are washed two times in Biotek washer with 200 ul of HBSS (Hank's Balanced Salt Solution) leaving 100 ul of buffer after the final wash.

[1195] A stock solution of 1 mg/ml fluo-4 is made in 10% pluronic acid DMSO. To load the cells with fluo-4 , 50 ul of 12 ug/ml fluo-4 is added to each well. The plate is incubated at 37 degrees C. in a CO₂ incubator for 60 min. The plate is washed four times in the Biotek washer with HBSS leaving 100 ul of buffer.

[1196] For non-adherent cells, the cells are spun down from culture media. Cells are re-suspended to 2-5x10⁶ cells/ml with HBSS in a 50-ml conical tube. 4 ul of 1 mg/ml fluo-4 solution in 10% pluronic acid DMSO is added to each ml of cell suspension. The tube is then placed in a 37 degrees C. water bath for 30-60 min. The cells are washed twice with HBSS, resuspended to 1×10⁶ cells/ml, and dispensed into a microplate, 100 ul/well. The plate is centrifuged at 1000 rpm for 5 min. The plate is then washed once in Denley Cell Wash with 200 ul, followed by an aspiration step to 100 ul final volume.

[1197] For a non-cell based assay, each well contains a fluorescent molecule, such as fluo-4 . The supernatant is added to the well, and a change in fluorescence is detected.

[1198] To measure the fluorescence of intracellular calcium, the FLIPR is set for the following parameters: (1) System gain is 300-800 mW; (2) Exposure time is 0.4 second; (3) Camera Fistop is F/2; (4) Excitation is 488 nm; (5) Emission is 530 nm; and (6) Sample addition is 50 ul. Increased emission at 530 nm indicates an extracellular signaling event caused by the a molecule, either polypeptide of the present invention or a molecule induced by polypeptide of the present invention, which has resulted in an increase in the intracellular Ca++concentration.

### Example 38

### High-Throughput Screening Assay Identifying Tyrosine Kinase Activity

[1199] The Protein Tyrosine Kinases (PTK) represent a diverse group of transmembrane and cytoplasmic kinases. Within the Receptor Protein Tyrosine Kinase RPTK) group are receptors for a range of mitogenic and metabolic growth factors including the PDGF, FGF, EGF, NGF, HGF and Insulin receptor subfamilies. In addition there are a large family of RPTKs for which the corresponding ligand is unknown. Ligands for RPTKs include mainly secreted small proteins, but also membrane-bound and extracellular matrix proteins.

[1200] Activation of RPTK by ligands involves ligand-mediated receptor dimerization, resulting in transphosphorylation of the receptor subunits and activation of the cytoplasmic tyrosine kinases. The cytoplasmic tyrosine kinases include receptor associated tyrosine kinases of the src-family (e.g., src, yes, Ick, lyn, fyn) and non-receptor linked and cytosolic protein tyrosine kinases, such as the Jak family, members of which mediate signal transduction triggered by the cytokine superfamily of receptors (e.g., the Interleukins, Interferons, GM-CSF, and Leptin).

[1201] Because of the wide range of known factors capable of stimulating tyrosine kinase activity, identifying whether polypeptide of the present invention or a molecule induced by polypeptide of the present invention is capable of activating tyrosine kinase signal transduction pathways is of interest. Therefore, the following protocol is designed to identify such molecules capable of activating the tyrosine kinase signal transduction pathways.

[1202] Seed target cells (e.g., primary keratinocytes) at a density of approximately 25,000 cells per well in a 96 well Loprodyne Silent Screen Plates purchased from Nalge Nunc (Naperville, Ill.). The plates are sterilized with two 30 minute rinses with 100% ethanol, rinsed with water and dried overnight. Some plates are coated for 2 hr with 100 ml of cell culture grade type I collagen (50 mg/ml), gelatin (2%) or polylysine (50 mg/ml), all of which can be purchased from Sigma Chemicals (St. Louis, Mo.) or 10% Matrigel purchased from Becton Dickinson (Bedford, Mass.), or calf serum, rinsed with PBS and stored at 4 degree C. Cell growth on these plates is assayed by seeding 5,000 cells/well in growth medium and indirect quantitation of cell number through use of alamarBlue as described by the manufacturer Alamar Biosciences, Inc. (Sacramento, Calif.) after 48 hr. Falcon plate covers #3071 from Becton Dickinson (Bedford, Mass.) are used to cover the Loprodyne Silent Screen Plates. Falcon Microtest III cell culture plates can also be used in some proliferation experiments.

[1203] To prepare extracts, A431 cells are seeded onto the nylon membranes of Loprodyne plates (20,000/200 ml/well) and cultured overnight in complete medium. Cells are quiesced by incubation in serum-free basal medium for 24 hr. After 5-20 minutes treatment with EGF (60ng/ml) or 50 ul of the supernatant produced in Example 30, the medium was removed and 100 ml of extraction buffer ((20 mM HEPES pH 7.5, 0.15 M NaCl, 1% Triton X-200, 0.1% SDS, 2 mM Na3VO4, 2 mM Na4P207 and a cocktail of protease inhibitors (#1836170) obtained from Boehringer Mannheim (Indianapolis, Ind.)) is added to each well and the plate is shaken on a rotating shaker for 5 minutes at 4° C. The plate is then placed in a vacuum transfer manifold and the extract filtered through the 0.45 mm membrane bottoms of each well using house vacuum. Extracts are collected in a 96-well catch/assay plate in the bottom of the vacuum manifold and immediately placed on ice. To obtain extracts clarified by centrifugation, the content of each well, after detergent solubilization for 5 minutes, is removed and centrifuged for 15 minutes at 4 degree C. at 16,000×g.

[1204] Test the filtered extracts for levels of tyrosine kinase activity. Although many methods of detecting tyrosine kinase activity are known, one method is described here.

[1205] Generally, the tyrosine kinase activity of a supernatant is evaluated by determining its ability to phosphorylate a tyrosine residue on a specific substrate (a biotinylated peptide). Biotinylated peptides that can be used for this purpose include PSK1 (corresponding to amino acids 6-20 of the cell division kinase cdc2-p34) and PSK2 (corresponding to amino acids 1-17 of gastrin). Both peptides are substrates for a range of tyrosine kinases and are available from Boehringer Mannheim.

[1206] The tyrosine kinase reaction is set up by adding the following components in order. First, add 10 ul of 5 uM Biotinylated Peptide, then 10 ul ATP/Mg₂₊(5mM ATP/50 mM MgCl₂), then 10 ul of 5×Assay Buffer (40 mM imidazole hydrochloride, pH7.3, 40 mM beta-glycerophosphate, 1 mM EGTA, 100 mM MgCl₂, 5 mM MnCl₂, 0.5 mg/ml BSA), then 5 ul of Sodium Vanadate (1 mM), and then 5 ul of water. Mix the components gently and preincubate the reaction mix at 30 degree C. for 2 min. Initial the reaction by adding 10 ul of the control enzyme or the filtered supernatant.

[1207] The tyrosine kinase assay reaction is then terminated by adding 10 ul of 120 mm EDTA and place the reactions on ice.

[1208] Tyrosine kinase activity is determined by transferring 50 ul aliquot of reaction mixture to a microtiter plate (MTP) module and incubating at 37 degree C. for 20 min. This allows the streptavidin coated 96 well plate to associate with the biotinylated peptide. Wash the MTP module with 300 ul/well of PBS four times. Next add 75 ul of anti-phospotyrosine antibody conjugated to horse radish peroxidase (anti-P-Tyr-POD(0.5 u/ml)) to each well and incubate at 37 degree C. for one hour. Wash the well as above.

[1209] Next add 100 ul of peroxidase substrate solution (Boehringer -Mannheim) and incubate at room temperature for at least 5 mins (up to 30 min). Measure the absorbance of the sample at 405 nm by using ELISA reader. The level of bound peroxidase activity is quantitated using an ELISA reader and reflects the level of tyrosine kinase, activity.

### Example 39

### High-Throughput-Screening Assay Identifying Phosphorylation Activity

[1210] As a potential alternative and/or complement to the assay of protein tyrosine kinase activity described in Example 38, an assay which detects activation (phosphorylation) of major intracellular signal transduction intermediates can also be used. For example, as described below one particular assay can detect tyrosine phosphorylation of the Erk-1 and Erk-2 kinases. However, phosphorylation of other molecules, such as Raf, JNK, p38 MAP, Map kinase kinase (MEK), MEK kinase, Src, Muscle specific kinase (MuSK), IRAK, Tec, and Janus, as well as any other phosphoserine, phosphotyrosine, or phosphothreonine molecule, can be detected by substituting these molecules for Erk-1 or Erk-2 in the following assay.

[1211] Specifically, assay plates are made by coating the wells of a 96-well ELISA plate with 0.1 ml of protein G (lug/ml) for 2 hr at room temp, (RT). The plates are then rinsed with PBS and blocked with 3% BSA/PBS for 1 hr at RT. The protein G plates are then treated with 2 commercial monoclonal antibodies (100 ng/well) against Erk-1 and Erk-2 (1 hr at RT) (Santa Cruz Biotechnology). (To detect other molecules, this step can easily be modified by substituting a monoclonal antibody detecting any of the above described molecules.) After 3-5 rinses with PBS, the plates are stored at 4 degree C. until use.

[1212] A431 cells are seeded at 20,000/well in a 96-well Loprodyne filterplate and cultured overnight in growth medium. The cells are then starved for 48 hr in basal medium (DMEM) and then treated with EGF (6ng/well) or 50 ul of the supernatants obtained in Example 30 for 5-20 minutes. The cells are then solubilized and extracts filtered directly into the assay plate.

[1213] After incubation with the extract for 1 hr at RT, the wells are again rinsed. As a positive control, a commercial preparation of MAP kinase (10 ng/well) is used in place of A431 extract. Plates are then treated with a commercial polyclonal (rabbit) antibody (1 ug/ml) which specifically recognizes the phosphorylated epitope of the Erk-1 and Erk-2 kinases (1 hr at RT). This antibody is biotinylated by standard procedures. The bound polyclonal antibody is then quantitated by successive incubations with Europium-streptavidin and Europium fluorescence enhancing reagent in the Wallac DELFIA instrument (time-resolved fluorescence). An increased fluorescent signal over background indicates a phosphorylation by polypeptide of the present invention or a molecule induced by polypeptide of the′ present invention.

### Example 40

### Assay for the Stimulation of Bone Marrow CD34+ Cell Proliferation

[1214] This assay is based on the ability of human CD34+ to proliferate in the presence of hematopoietic growth factors and evaluates the ability of isolated polypeptides expressed in mammalian cells to stimulate proliferation of CD34+ cells.

[1215] It has been previously shown that most mature precursors will respond to only a single signal. More immature precursors require at least′ two signals to respond. Therefore, to test the effect of polypeptides on hematopoietic activity of a wide range of progenitor cells, the assay contains a given polypeptide in the presence or absence of other hematopoietic growth factors. Isolated cells are cultured for 5 days in the presence of Stem Cell Factor (SCF) in combination with tested sample. SCF alone has a very limited effect on the proliferation of bone marrow (BM) cells, acting in such conditions only as a “survival” factor. However, combined with any factor exhibiting stimulatory effect on these cells (e.g., IL-3), SCF will cause a synergistic effect. Therefore, if the tested polypeptide has a stimulatory effect on hematopoietic progenitors, such activity can be easily detected. Since normal BM cells have a low level of cycling cells, it is likely that any inhibitory effect of a given polypeptide, or agonists or antagonists thereof, might not be detected. Accordingly, assays for an inhibitory effect on progenitors is preferably tested in cells that are first subjected to in vitro stimulation with SCF+IL+3, and then contacted with the compound that is being evaluated for inhibition of such induced proliferation.

[1216] Briefly, CD34+ cells are isolated using methods known in the art. The cells are thawed and resuspended in medium (QBSF 60 serum-free medium with 1% L-glutamine (500 ml) Quality Biological, Inc., Gaithersburg, Md. Cat# 160-204-101). After several gentle centrifugation steps at 200×g, cells are allowed to rest for one hour. The cell count is adjusted to 2.5×10⁵ cells/ml. During this time, 100 μl of sterile water is added to the peripheral wells of a 96-well plate. The cytokines that can be tested with a given polypeptide in this assay is rhSCF (R&D Systems, Minneapolis, Minn., Cat# 255-SC) at 50 ng/ml alone and in combination with rhSCF and rhIL-3 (R&D Systems, Minneapolis, Minn., Cat# 203-ML) at 30 ng/ml. After one hour, 10 μl of prepared cytokines, 50 μl of the supernatants prepared in Example 30 (supernatants at 1:2 dilution=50 μl) and 20 μl of diluted cells are added to the media which is already present in the wells to allow for a final total volume of 100 μl. The plates are then placed in a 37° C./5% CO₂ incubator for five days.

[1217] Eighteen hours before the assay is harvested, 0.5 μCi/well of [3H] Thymidine is added in a 10 μl volume to each well to determine the proliferation rate. The experiment is terminated by harvesting the cells from each 96-well plate to a filtermat using the Tomtec Harvester 96. After harvesting, the filtermats are dried, trimmed and placed into OmniFilter assemblies consisting of one OmniFilter plate and one OmniFilter Tray. 60 μl Microscint is added to each well and the plate sealed with TopSeal-A press-on sealing film A bar code 15 sticker is affixed to the first plate for counting. The sealed plates are then loaded and the level of radioactivity determined via the Packard Top Count and the printed data collected for analysis. The level of radioactivity reflects the amount of cell proliferation.

[1218] The studies described in this example test the activity of a given polypeptide to stimulate bone marrow CD34+cell proliferation. One skilled in the art could easily modify the exemplified studies to test the activity of polynucleotides (e.g., gene therapy), antibodies, agonists, and/or-antagonists and fragments and variants thereof. As a nonlimiting example, potential antagonists tested in this assay would be expected to inhibit cell proliferation in the presence of cytokines and/or to increase the inhibition of cell proliferation in the presence of cytokines and a given polypeptide. In contrast, potential agonists tested in this assay would be expected to enhance cell proliferation and/or to decrease the inhibition of cell proliferation in the presence of cytokines and a given polypeptide.

[1219] The ability of a gene to stimulate the proliferation of bone marrow CD34+ cells indicates that polynucleotides and polypeptides corresponding to the gene are useful for the diagnosis and treatment of disorders affecting the immune system and hematopoiesis. Representative uses are described in the “Immune Activity” and “Infectious Disease” sections above, and elsewhere herein.

### Example 41

### Assay for Extracellular Matrix Enhanced Cell Response (EMECR)

[1220] The objective of the Extracellular Matrix Enhanced Cell Response (EMECR) assay is to identify gene products (e.g., isolated polypeptides) that act on the hematopoietic stem cells in the context of the extracellular matrix (ECM) induced signal.

[1221] Cells respond to the regulatory factors in the context of signal(s) received from the surrounding microenvironment. For example, fibroblasts, and endothelial and epithelial stem cells fail to replicate in the absence of signals from the ECM. Hematopoietic stem cells can undergo self-renewal in the bone marrow, but not in in vitro suspension culture. The ability of stem cells to undergo self-renewal in vitro is dependent upon their interaction with the stromal cells and the ECM protein fibronectin (fn). Adhesion of cells to fn is mediated by the α_{5.}β₁ and α_{4.}β₁ integrin receptors, which are-expressed by human and mouse hematopoietic stem cells. The factor(s) which integrate with the ECM environment and are responsible for stimulating stem cell self-renewal have not yet been identified. Discovery of such factors should be of great interest in gene therapy and bone marrow transplant applications

[1222] Briefly, polystyrene, non tissue culture treated, 96-well plates are coated with fn fragment at a coating concentration of 0.2 μg/ cm². Mouse bone marrow cells are plated (1,000 cells/well ) in 0.2 ml of serum-free medium. Cells cultured in the presence of IL-3 ( 5 ng/ml)+SCF (50 ng/ml ) would serve as the positive control, conditions under which little self-renewal but pronounced differentiation of the stem cells is to be expected. Gene products of the invention (e.g., including, but not limited to, polynucleotides and polypeptides of the present invention, and supernatants produced in Example 30), are tested with appropriate negative controls in the presence and absence of SCF(5.0 ng/ml), where test factor supernatants represent 10% of the total assay volume. The plated cells are then allowed to grow by incubating in a low oxygen environment ( 5% CO₂, 7% O₂, and 88% N₂ ) tissue culture incubator for 7 days. The number of proliferating cells within the wells is then quantitated by measuring thymidine incorporation into cellular DNA. Verification of the positive hits in the assay will require phenotypic characterization of the cells, which can be accomplished by scaling up of the culture system and using appropriate antibody reagents against cell surface antigens and FACScan.

[1223] One skilled in the art could easily modify the exemplified studies to test the activity of polynucleotides (e.g., gene therapy), antibodies, agonists, and/or antagonists and fragments and variants thereof.

[1224] If a particular polypeptide of the present invention is found to be a stimulator of hematopoietic progenitors, polynucleotides and polypeptides corresponding to the gene encoding said polypeptide may be useful for the diagnosis and treatment of disorders affecting the immune system and hematopoiesis. Representative uses are described in the “Immune Activity” and “Infectious Disease” sections above, and elsewhere herein. The gene product may also be useful in the expansion of stem cells and committed progenitors of various blood lineages, and in the differentiation and/or proliferation of various cell types.

[1225] Additionally, the polynucleotides and/or polypeptides of the gene of interest and/or agonists and/or antagonists thereof, may also be employed to inhibit the proliferation and differentiation of hematopoietic cells and therefore may be employed to protect bone marrow stem cells from chemotherapeutic agents during chemotherapy. This antiproliferative effect may allow administration of higher doses of chemotherapeutic agents and, therefore, more effective chemotherapeutic treatment.

[1226] Moreover, polynucleotides and polypeptides corresponding to the gene of interest may also be useful for the treatment and diagnosis of hematopoietic related disorders such as, for example, anemia, pancytopenia, leukopenia, thrombocytopenia or leukemia since stromal cells are important in the production of cells of hematopoietic lineages. The uses include bone marrow cell ex-vivo culture, bone marrow transplantation, bone marrow reconstitution, radiotherapy or chemotherapy of neoplasia.

### Example 42

### Human Dermal Fibroblast and Aortic Smooth Muscle Cell Proliferation

[1227] The polypeptide of interest is added to cultures of normal human dermal fibroblasts (NHDF) and human aortic smooth muscle cells (AoSMC) and two co-assays are performed with each sample. The first assay examines the effect of the polypeptide of interest on the proliferation of normal human dermal fibroblasts (NHDF) or aortic smooth muscle cells (AoSMC). Aberrant growth of fibroblasts or smooth muscle cells is a part of several pathological processes, including fibrosis, and restenosis. The second assay examines IL6 production by both NHDF and SMC. IL6 production is an indication of functional activation. Activated cells will have increased production of a number of cytokines and other factors, which can result in a proinflammatory or immunomodulatory outcome. Assays are run with and without co-TNFa stimulation, in order to check for costimulatory or inhibitory activity.

[1228] Briefly, on day 1, 96-well black plates are set up with 1000 cells/well (NHDF) or 2000 cells/well (AOSMC) in 100 μl culture media. NHDF culture media contains: Clonetics FB basal media, 1 mg/ml hFGF, 5 mg/ml insulin, 50 mg/ml gentamycin, 2% FBS, while AoSMC culture media contains Clonetics SM basal media, 0.5 μg/ml hEGF, 5 mg/ml insulin, 1 μg/ml hFGF, 50 mg/ml gentamycin, 50 μg/ml Amphotericin B, 5% FBS. After incubation at 37° C. for at least 4-5 hours culture media is aspirated and replaced with growth arrest media. Growth arrest media for NHDF contains-fibroblast basal media, 50 mg/ml gentamycin, 2% FBS, while growth arrest media for AoSMC contains SM basal media, 50 mg/ml gentamycin, 50 μg/ml Amphotericin B, 0.4% FBS. Incubate at 37° C. until day 2.

[1229] On day 2, serial dilutions and templates of the polypeptide of interest are designed such that they always include media controls and known-protein controls. For both stimulation and inhibition experiments, proteins are diluted in growth arrest media. For inhibition experiments, TNFa is added to a final concentration of 2 ng/ml (NHDF) or 5 ng/ml (AoSMC). Add ⅓ vol media containing controls or polypeptides of the present invention and incubate at 37 degrees C./5% CO₂ until day 5.

[1230] Transfer 60 μl from each well to another labeled 96-well plate, cover with a plate-sealer, and store at 4 degrees C. until Day 6 (for IL6 ELISA). To the remaining 100 μl in the cell culture plate, aseptically add Alamar Blue in an amount equal to 10% of the culture volume (10 μl). Return plates to incubator for 3 to 4 hours. Then measure fluorescence with excitation at 530 nm and emission at 590 nm using the CytoFluor. This yields the growth stimulation/inhibition data.

[1231] On day 5, the IL6 ELISA is performed by coating a 96 well plate with 50-100 ul/well of Anti-Human IL6 Monoclonal antibody diluted in PBS, pH 7.4, incubate ON at room temperature.

[1232] On day 6, empty the plates into the sink and blot on paper towels. Prepare Assay Buffer containing PBS with 4% BSA. Block the plates with 200 μl/well of Pierce Super Block blocking buffer in PBS for 1-2 hr and then wash plates with wash buffer (PBS, 0.05% Tween-20). Blot plates on paper towels. Then add 50 μl/well of diluted Anti-Human IL-6 Monoclonal, Biotin-labeled antibody at 0.50 mg/ml. Make dilutions of IL-6 stock in media (30, 10, 3, 1, 0.3, 0 ng/ml). Add duplicate samples to top row of plate. Cover the plates and incubate for 2 hours at RT on shaker.

[1233] Plates are washed with wash buffer and blotted on paper towels. Dilute EU-labeled Streptavidin 1:1000 in Assay buffer, and add 100 μl/well. Cover the plate and incubate 1 h at RT. Plates are again washed with wash buffer and blotted on paper towels.

[1234] Add 100 μl/well of Enhancement Solution. Shake for 5 minutes. Read the plate on the Wallac DELFIA Fluorometer. Readings from triplicate samples in each assay were tabulated and averaged.

[1235] A positive result in this assay suggests AoSMC cell proliferation and that the polypeptide of the present invention may be involved in dermal fibroblast proliferation and/or smooth muscle cell proliferation. A positive result also suggests many potential uses of polypeptides, polynucleotides, agonists and/or antagonists of the polynucleotide/polypeptide of the present invention which gives a positive result. For example, inflammation and immune responses, wound healing, and angiogenesis, as detailed throughout this specification. Particularly, polypeptides of the present invention and polynucleotides of the present invention may be. used in wound healing and dermal regeneration, as well as the promotion of vasculogenesis, both of the blood vessels and lymphatics. The growth of vessels can be used in the treatment of, for example, cardiovascular diseases. Additionally, antagonists of polypeptides and polynucleotides of the invention may be useful in treating diseases, disorders, and/or conditions which involve angiogenesis by acting as an anti-vascular agent (e.g., anti-angiogenesis). These diseases, disorders, and/or conditions are known in the art and/or are described herein, such as, for example, malignancies, solid tumors, benign tumors, for example hemangiomas, acoustic neuromas, neurofibromas, trachomas, and pyogenic granulomas; artheroscteric plaques; ocular angiogenic diseases, for example, diabetic retinopathy, retinopathy of prematurity, macular degeneration, corneal graft rejection, neovascular glaucoma, retrolental fibroplasia, rubeosis, retinoblastoma, uvietis and Pterygia (abnormal blood vessel growth) of the eye; rheumatoid arthritis; psoriasis; delayed wound healing; endometriosis; vasculogenesis; granulations; hypertrophic scars (keloids); nonunion fractures; scleroderma; trachoma; vascular adhesions; myocardial angiogenesis; coronary collaterals; cerebral collaterals; arteriovenous malformations; ischemic limb angiogenesis; Osler-Webber Syndrome; plaque neovascularization; telangiectasia; hemophiliac joints; angiofibroma; fibromuscular dysplasia; wound granulation; Crohn's disease; and atherosclerosis. Moreover, antagonists of polypeptides and polynucleotides of the invention may be useful in treating anti-hyperproliferative diseases and/or anti-inflammatory known in the art and/or described herein.

[1236] One skilled in the art could easily modify the exemplified studies to test the activity of polynucleotides (e.g., gene therapy), antibodies, agonists, and/or antagonists and fragments and variants thereof

### Example 43

### Cellular Adhesion Molecule (CAM) Expression on Endothelial Cells

[1237] The recruitment of lymphocytes to areas of inflammation and angiogenesis involves specific receptor-ligand interactions between cell surface adhesion molecules (CAMs) on lymphocytes and the vascular endothelium.; The adhesion process, in both normal and pathological settings, follows a multi-step cascade that involves intercellular adhesion molecule-1 (ICAM-1), vascular cell adhesion molecule-1 (VCAM-1), and endothelial leukocyte adhesion molecule- 1(E-selectin) expression on endothelial cells (EC). The expression of these molecules and others on the vascular endothelium determines the efficiency with which leukocytes may adhere to the local vasculature and extravasate into the local tissue during the development of an inflammatory response. The local concentration of cytokines and growth factor participate in the modulation of the expression of these CAMs.

[1238] Briefly, endothelial cells (e.g., Human Umbilical Vein Endothelial cells (HUVECs)) are grown in a standard 96 well plate to confluence, growth medium is removed from the cells and replaced with 100 μl of 199 Medium (10% fetal bovine serum (FBS)). Samples for testing and positive or negative controls are added to the plate in triplicate (in 10 μl volumes). Plates are then incubated at 37° C. for either 5 h (selectin and integrin expression) or 24 h (integrin expression only). Plates are aspirated to remove medium and 100 μl of 0.1% paraformaldehyde-PBS(with Ca++ and Mg++) is added to each well. Plates are held at 4° C. for 30 min. Fixative is removed from the wells and wells are washed 1× with PBS(+Ca,Mg) +0.5% BSA and drained. 10 μl of diluted primary antibody is added to the test and control wells. Anti-ICAM-1-Biotin, Anti-VCAM-1-Biotin and Anti-E-selectin-Biotin are used at a concentration of 10 μg/ml (1:10 dilution of 0.1 mg/ml stock antibody). Cells are incubated at 37° C. for 30 min. in a humidified environment. Wells are washed three times with PBS(+Ca,Mg)+0.5% BSA. 20 μl of diluted ExtrAvidin-Alkaline Phosphatase (1:5,000 dilution, referred to herein as the working dilution) are added to each well and incubated at 37° C. for 30 min. Wells are washed three times with PBS(#Ca,Mg)+0.5% BSA. Dissolve 1 tablet of p-Nitrophenol Phosphate pNPP per 5 ml of glycine buffer (pH 10.4). 100 μl of pNPP substrate in glycine buffer is added to each test well. Standard wells in triplicate are prepared from the working dilution of the ExtrAvidin-Alkaline Phosphotase in glycine buffer: 1:5,000 (10⁰)>10^{-0.5}>10⁻¹>10^{-1.5}0.5 μl of each dilution is added to triplicate wells and the resulting AP content in each well is 5.50 ng, 1.74 ng, 0.55 ng, 0.18 ng. 100 μl of pNNP reagent is then added to each of the standard wells. The plate is incubated at 37° C. for 4 h. A volume of 50 μl of 3M NaOH is added to all wells. The plate is read on a plate reader at 405 nm using the background subtraction option on blank wells filled with glycine buffer only. Additionally, the template is set up to indicate the concentration of AP-conjugate in each standard well [5.50 ng; 1.74 ng; 0.55 ng; 0.18 ng]. Results are indicated as amount of bound AP-conjugate in each sample.

### Example 44

### Alamar Blue Endothelial Cells Proliferation Assay

[1239] This assay may be used to quantitatively determine protein mediated inhibition of bFGF-induced proliferation of Bovine Lymphatic Endothelial Cells (LECs), Bovine Aortic Endothelial Cells (BAECs) or Human Microvascular Uterine Myometrial Cells (UTMECs). This assay incorporates a fluorometric growth indicator based on detection of metabolic activity. A standard Alamar Blue Proliferation Assay is prepared in EGM-2MV with 10 ng /ml of bFGF added as a source of endothelial cell stimulation. This assay may be used with a variety of endothelial cells with slight changes in growth medium and cell concentration. Dilutions of the protein batches to be tested are diluted as appropriate. Serum-free medium (GIBCO SFM) without bFGF is used as a non-stimulated control and Angiostatin or TSP-1 are included as a known inhibitory controls.

[1240] Briefly, LEC, BAECs or UTMECs are seeded in growth media at a density of 5000 to 2000 cells/well in a 96 well plate and placed at 37 degrees C. overnight. After the overnight incubation of the cells, the growth media is removed and replaced with GIBCO EC-SFM. The cells are treated with the appropriate dilutions of the protein of interest or control protein sample(s) (prepared in SFM ) in triplicate wells with additional bFGF to a concentration of 10 ng/ml. Once the cells have been treated with the samples, the plate(s) is/are placed back in the 37° C. incubator for three days. After three days 10 ml of stock alamar blue (Biosource Cat# DAL1100) is added to each well and the plate(s) is/are placed back in the 37° C. incubator for four hours. The plate(s) are then read at 530 nm excitation and 590 nm emission using the CytoFluor fluorescence reader. Direct output is recorded in relative fluorescence units.

[1241] Alamar blue is an oxidation-reduction indicator that both fluoresces and changes color in response to chemical reduction of growth medium resulting from cell growth. As cells grow in culture, innate metabolic activity results in a chemical reduction of the immediate surrounding environment. Reduction related to growth causes the indicator to change from oxidized (non-fluorescent blue) form to reduced (fluorescent red) form (i.e., stimulated proliferation will produce a stronger signal and inhibited proliferation will produce a weaker signal and the total signal is proportional to the total number of cells as well as their metabolic activity). The background level of activity is observed with the starvation medium alone. This is compared to the output observed from the positive control samples (bFGF in growth medium) and protein dilutions.

### Example 45

### Detection of Inhibition of a Mixed Lymphocyte Reaction

[1242] This assay can be used to detect and evaluate inhibition of a Mixed Lymphocyte Reaction (MLR) by gene products (e.g., isolated polypeptides). Inhibition of a MLR may be due to a direct effect on cell proliferation and viability, modulation of costimulatory molecules on interacting cells, modulation of adhesiveness between lymphocytes and accessory cells, or modulation of cytokine production by accessory cells. Multiple cells may be targeted by these polypeptides since the peripheral blood mononuclear fraction used in this assay includes T, B and natural killer lymphocytes, as well as monocytes and dendritic cells.

[1243] Polypeptides of interest found to inhibit the MLR may find application in diseases associated with lymphocyte and monocyte activation or proliferation. These include, but are not limited to, diseases such as asthma, arthritis, diabetes, inflammatory skin conditions, psoriasis, eczema, systemic lupus erythematosus, multiple sclerosis, glomerulonephritis, inflammatory bowel disease, crohn's disease, ulcerative colitis, arteriosclerosis, cirrhosis, graft vs. host disease, host vs. graft disease, hepatitis, leukemia and lymphoma.

[1244] Briefly, PBMCs from human donors are purified by density gradient centrifugation using Lymphocyte Separation Medium (LSM®, density 1.0770 g/ml, Organon Teknika Corporation, West Chester, Pa.). PBMCs from two donors are adjusted to 2×10⁶ cells/ml in RPMI-1640 (Life Technologies, Grand Island, N.Y.) supplemented with 10% FCS and 2 mM glutamine. PBMCs from a third donor is adjusted to 2×10⁵ cells/ml. Fifty microliters of PBMCs from each donor is added to wells of a 96-well round bottom microtiter plate. Dilutions of test materials (50 μl) is added in triplicate to microtiter wells. Test samples (of the protein of interest) are added for final dilution of 1:4; rhuIL-2 (R&D Systems, Minneapolis, Minn., catalog number 202-IL) is added to a final concentration of 1 ug/ml; anti-CD4 mAb (R&D Systems, clone 34930.11, catalog number MAB379) is added to a final concentration of 10 μg/ml. Cells are cultured for 7-8 days at 37° C. in 5% CO₂, and 1 μC of [³H] thymidine is added to wells for the last 16 hrs of culture. Cells are harvested and thymidine incorporation determined using a Packard TopCount. Data is expressed as the mean and standard deviation of triplicate determinations.

[1245] Samples of the protein of interest are screened in separate experiments and compared to the negative control treatment, anti-CD4 mAb, which inhibits proliferation of lymphocytes and the positive control treatment, IL-2 (either as recombinant material or supernatant), which enhances proliferation of lymphocytes.

[1246] One skilled in the art could easily modify the exemplified studies to test the activity of polynucleotides (e.g., gene therapy), antibodies, agonists, and/or antagonists and fragments and variants thereof.

### Example 46

### Assays for Protease Activity

[1247] The following assay may be used to assess protease activity of the polypeptides of the invention.

[1248] Gelatin and casein zymography are performed essentially as described (Heusen et al., Anal. Biochem., 102:196-202 (1980); Wilson et al., Journal of Urology, 149:653-658 (1993)). Samples are run on 10% polyacryamide/0.1% SDS gels containing 1% gelain orcasein, soaked in 2.5% triton at room temperature for 1 hour, and in 0.1M glycine, pH 8.3 at 37° C. 5 to 16 hours. After staining in amido black areas of proteolysis apear as clear areas agains the blue-black background. Trypsin (Sigma T8642) is used as a positive control.

[1249] Protease activity is also determined by monitoring the cleavage of n-a-benzoyl-L-arginine ethyl ester (BAEE) (Sigma B-4500. Reactions are set up in (25 mMNaPO₄, 1 mM EDTA, and 1 mM BAEE), pH 7.5. Samples are added and the change in adsorbance at 260 nm is monitored on the Beckman DU-6 spectrophotometer in the time-drive mode. Trypsin is used as a positive control.

[1250] Additional assays based upon the release of acid-soluble peptides from casein or hemoglobin measured as adsorbance at 280 nm or colorimetrically using the Folin method are performed as described in Bergmeyer, et al., Methods of Enzymatic Analysis, 5 (1984). Other assays involve the solubilization of chromogenic substrates (Ward, Applied Science, 251-317 (1983).

### Example 47

### Identifying Serine Protease Substrate Specificity

[1251] Methods known in the art or described herein may be used to determine the substrate specificity of the polypeptides of the present invention having serine protease activity. A preferred method of determining substrate specificity is by the use of positional scanning synthetic combinatorial libraries as described in GB 2 324 529 (incorporated herein in its entirety).

### Example 48

### Ligand Binding Assays

[1252] The following assay may be used to assess ligand binding activity of the polypeptides of the invention.

[1253] Ligand binding assays provide a direct method for ascertaining receptor pharmacology and are adaptable to a high throughput format. The purified ligand for a polypeptide is radiolabeled to high specific activity (50-2000 Ci/mmol) for binding studies. A determination is then made that the process of radiolabeling does not diminish the activity of the ligand towards its polypeptide. Assay conditions for buffers, ions, pH and other modulators such as nucleotides are optimized to establish a workable signal to noise ratio for both membrane and whole cell polypeptide sources. For these assays, specific polypeptide binding is defined as total associated radioactivity minus the radioactivity measured in the presence of an excess of unlabeled competing ligand. Where possible, more than one competing ligand is used to define residual nonspecific binding.

### Example 49

### Functional Assay in Xenopus Oocytes

[1254] Capped RNA transcripts from linearized plasmid templates encoding the polypeptides of the invention are synthesized in vitro with RNA polymerases in accordance with standard procedures. In vitro transcripts are suspended in water at a final concentration of 0.2 mg/mi. Ovarian lobes are removed from adult female toads, Stage V defolliculated oocytes are obtained, and RNA transcripts (10 ng/oocytc) are injected in a 50 nl bolus using a microinjection apparatus. Two electrode voltage clamps are used to measure the currents from individual Xenopus oocytes in response polypeptides and polypeptide agonist exposure. Recordings are made in Ca2+ free Barth's medium at room temperature. The Xenopus system can be used to screen known ligands and tissue/cell extracts for activating ligands.

### Example 50

### Microphysiometric Assays

[1255] Activation of a wide variety of secondary messenger systems results in extrusion of small amounts of acid from a cell. The acid formed is largely as a result of the increased metabolic activity required to fuel the intracellular signaling process. The pH changes in the media surrounding the cell are very small but are detectable by the CYTOSENSOR microphysiometer (Molecular Devices Ltd., Menlo Park, Calif.). The CYTOSENSOR is thus capable of detecting the activation of polypeptide which is coupled to an energy utilizing intracellular signaling pathway.

### Example 51

### Extract/Cell Supernatant Screening

[1256] A large number of mammalian receptors exist for which there remains, as yet, no cognate activating ligand -(agonist). Thus, active ligands for these receptors may not be included within the ligands banks as identified to date. Accordingly, the polypeptides of the invention can also be functionally screened (using calcium, cAMP, microphysiometer, oocyte electrophysiology, etc., functional screens) against tissue extracts to identify its natural ligands. Extracts that produce positive functional responses can be sequentially subfractionated until an activating ligand is isolated and identified.

### Example 52

### Calcium and cAMP Functional Assays

[1257] Seven transmembrane receptors which are expressed in HEK 293 cells have been shown to be coupled functionally to activation of PLC and calcium mobilization and/or cAMP stimulation or inhibition. Basal calcium levels in the HEK 293 cells in receptor-transfected or vector control cells were observed to be in the normal, 100 nM to 200 nM, range. HEK 293 cells expressing recombinant receptors are loaded with fura 2 and in a single day >150 selected ligands or tissue/cell extracts are evaluated for agonist induced calcium mobilization. Similarly, HEK 293 cells expressing recombinant receptors are evaluated for the stimulation or inhibition of cAMP production using standard cAMP quantitation assays. Agonists presenting a calcium transient or cAMP fluctuation are tested in vector control cells to determine if the response is unique to the transfected cells expressing receptor.

### Example 53

### ATP-binding assay

[1258] The following assay may be used to assess ATP-binding activity of polypeptides of the invention.

[1259] ATP-binding activity of the polypeptides of the invention may be detected using the ATP-binding assay described in U.S. Pat. No. 5,858,719, which is herein incorporated by reference in its entirety. Briefly, ATP-binding to polypeptides of the invention is measured via photoaffinity labeling with 8-azido-ATP in a competition assay. Reaction mixtures containing 1 mg/ml of the ABC transport protein of the present invention are incubated with varying concentrations of ATP, or the non hydrolyzable ATP analog adenyl-5′-imidodiphosphate for 10 minutes at 4° C. A mixture of 8-azido-ATP (Sigma Chem. Corp., St. Louis, Mo.) plus 8-azido-ATP (³²P-ATP) (5 mCi/μmol, ICN, Irvine Calif.) is added-to a final concentration of 100 ,M and 0.5 ml aliquots are placed in the wells of a porcelain spot plate on ice. The plate is irradiated using a short wave 254 nm UV lamp at a distance of 2.5 cm from the plate for two one-minute intervals with a one-minute cooling interval in between. The reaction is stopped by addition of dithiothreitol to a final concentration of 2 mM. The incubations are subjected to SDS-PAGE electrophoresis, dried, and autoradiographed. Protein bands corresponding to the particular polypeptides of the invention are excised, and the radioactivity quantified. A decrease in radioactivity with increasing ATP or adenly-5′-imidodiphosphate provides a measure of ATP affinity to the polypeptides.

### Example 54

### Small Molecule Screening

[1260] This invention is particularly useful for screening therapeutic compounds by using the polypeptides of the invention, or binding fragments thereof, in any of a variety of drug screening techniques. The polypeptide or fragment employed in such a test may be affixed to a solid support, expressed on a cell surface, free in solution, or located intracellularly. One method of drug screening utilizes eukaryotic or prokaryotic host cells which are stably transformed with recombinant nucleic acids expressing the polypeptide or fragment. Drugs are screened against such transformed cells in competitive binding assays. One may measure, for example, the formulation of complexes between the agent being tested and polypeptide of the invention.

[1261] Thus, the present invention provides methods of screening for drugs or any other agents which affect activities mediated-by the polypeptides of the invention. These methods comprise contacting such an agent with a polypeptide of the invention or fragment thereof and assaying for the presence of a complex between the agent and the polypeptide or fragment thereof, by methods well known in the art. In such a competitive binding assay, the agents to screen are typically labeled. Following incubation, free agent is separated from that present in bound form, and the amount of free or uncomplexed label is a measure of the ability of a particular agent to bind to the polypeptides of the invention.

[1262] Another technique for drug screening provides high throughput screening for compounds having suitable binding affinity to the polypeptides of the invention, and is described in great detail in European Patent Application 84/03564, published on Sep. 13, 1984, which is herein incorporated by reference in its entirety. Briefly stated, large numbers of different small molecule test compounds are synthesized on a solid substrate, such as plastic pins or some other surface. The test compounds are reacted with polypeptides of the invention. and washed. Bound polypeptides are then detected by methods well known in the art. Purified polypeptides are coated directly onto plates for use in the aforementioned drug screening techniques. In addition, non-neutralizing antibodies may be used to capture the peptide and immobilize it on the solid support.

[1263] This invention also contemplates the use of competitive drug screening assays in which neutralizing antibodies capable of binding polypeptides of the invention specifically compete with a test compound for binding to the polypeptides or fragments thereof. In this manner, the antibodies are used to detect the presence of any peptide which shares one or more antigenic epitopes with a polypeptide of the invention.

[1264] Example 55

### Phosphorylation Assay

[1265] In order to assay for phosphorylation activity of the polypeptides of the invention, a phosphorylation assay as described in U.S. Pat. No.5,958,405 (which is herein incorporated by reference) is utilized. Briefly, phosphorylation activity may be measured by phosphorylation of a protein substrate using gamma-labeled ³²P-ATP and quantitation of the incorporated radioactivity using a gamma radioisotope counter. The polypeptides of the invention are incubated with the protein substrate, ³²P-ATP, and a kinase buffer. The ³²P incorporated into the substrate is then separated from free ³²P-ATP by electrophoresis, and the incorporated ³²P is counted and compared to a negative control. Radioactivity counts above the negative control are indicative of phosphorylation activity of the polypeptides of the invention.

### Example 56

### Detection of Phosphorylation Activity (Activation) of the Polypeptides of the Invention in the Presence of Polypeptide Ligands

[1266] Methods known in the art or described herein may be used to determine the phosphorylation activity of the polypeptides of the invention. A preferred method of determining phosphorylation activity is by the use of the tyrosine phosphorylation assay as described in U.S. Pat. No. 5,817,471 (incorporated herein by reference).

### Example 57

### Identification of Signal Transduction Proteins that Interact with Polypeptides of the Present Invention

[1267] The purified polypeptides of the invention are research tools for the identification, characterization and purification of additional signal transduction pathway proteins or receptor proteins. Briefly, labeled receptor PTK polypeptide is useful as a reagent for the purification of molecules with which it interacts. In one embodiment of affinity purification, receptor PTK polypeptide is covalently coupled to a chromatography column. Cell-free extract derived from putative target cells, such as carcinoma tissues, is passed over the column, and molecules with appropriate affinity bind to the receptor PTK polypeptides, or specific phosphotyrosine-recognition domains thereof. The receptor PTK polypeptide interacting protein-complex is recovered from the column, dissociated, and the recovered molecule subjected to N-terminal protein sequencing. This amino acid sequence is then used to identify the captured molecule or to design degenerate oligonucleotide probes for cloning the relevant gene from an appropriate cDNA library.

### Example 58

### IL-6 Bioassay

[1268] To test the proliferative effects of the polypeptides of the invention, the IL-6 Bioassay as described by Marz et al. is utilized (Proc. Natl. Acad. Sci., U.S.A., 95:3251-56 (1998), which is herein incorporated by reference). Briefly, IL-6 dependent B9 murine cells are washed three times in IL-6 free medium and plated at a concentration of 5,000 cells per well in 50 μl, and 50 μl of the IL-6-like polypeptide is added. After 68 hrs. at 37° C., the number of viable cells is measured by adding the tetrazolium salt thiazolyl blue (MTT) and incubating for a further 4 hrs. at 37° C. B9 cells are lysed by SDS and optical density is measured at 570 nm. Controls containing IL-6 (positive) and no cytokine (negative) are utilized. Enhanced proliferation in the test sample(s) relative to the negative control is indicative of proliferative effects mediated by polypeptides of the invention.

### Example 59

### Support of Chicken Embryo Neuron Survival

[1269] To test whether sympathetic neuronal cell viability is supported by polypeptides of the invention, the chicken embryo neuronal survival assay of Senaldi et al is utilized (Proc. Natl. Acad. Sci., U.S.A., 96:11458-63 (1998), which is herein incorporated by reference). Briefly, motor and sympathetic neurons are isolated from chicken embryos, resuspended in L15 medium (with 10% FCS, glucose, sodium selenite, progesterone, conalbumin, putrescine, and insulin; Life Technologies, Rockville, Md.) and Dulbecco's modified Eagles medium [with 10% FCS, glutamine, penicillin, and 25 mM Hepes buffer (pH 7.2); Life Technologies, Rockville, Md.], respectively, and incubated at 37° C. in 5% CO₂ in the presence of different concentrations of the purified IL-6-like polypeptide, as well as a negative control lacking any cytokine. After 3 days, neuron survival is determined by evaluation of cellular morphology, and through the use of the colorimetric assay of Mosmann (Mossman, T., J. Immunol. Methods, 65:55-63 (1983)). Enhanced neuronal cell viability as compared to the controls lacking cytokine is indicative of the ability of the inventive purified IL-6-like polypeptide(s) to enhance the survival of neuronal cells.

### Example 60

### Assay for Phosphatase Activity

[1270] The following assay may be used to assess serine/threonine phosphatase (PTPase) activity of the polypeptides of the invention.

[1271] In order to assay for serine/threonine phosphatase (PTPase) activity, assays can be utilized which are widely known to those skilled in the art. For example, the serine/threonine phosphatase (PSPase) activity is measured using a PSPase assay kit from New England Biolabs, Inc. Myelin basic protein (MyBP), a substrate for PSPase, is phosphorylated on serine and threonine residues with cAMP-dependent Protein Kinase in the presence of [³²P]ATP. Protein serine/threonine phosphatase activity is then determined by measuring the release of inorganic phosphate from 32P-labeled MyBP.

### Example 61

### Interaction of Serine/Threonine Phosphatases with other Proteins

[1272] The polypeptides of the invention with serine/threonine phosphatase activity as determined in Example 60 are research tools for the identification, characterization and purification of additional interacting proteins or receptor proteins, or other signal transduction pathway proteins. Briefly, labeled polypeptide(s) of the invention is useful as a reagent for the purification of molecules with which it interacts. In one embodiment of affinity purification, polypeptide of the invention is covalently coupled to a chromatography column. Cell-free extract derived from putative target cells, such as neural or liver cells, is passed over the column, and molecules with appropriate affinity bind to the polypeptides of the invention. The polypeptides of the invention -complex is recovered from the column, dissociated, and the recovered molecule subjected to N-terminal protein sequencing. This amino acid sequence is then used to identify the captured molecule or to design degenerate oligonucleotide probes for cloning the relevant gene from an appropriate cDNA library.

### Example 62

### Assaying for Heparanase Activity

[1273] In order to assay for heparanase activity of the polypeptides of the invention, the heparanase assay described by Vlodavsky et al is utilized (Vlodavsky, I., et al., Nat. Med., 5:793-802 (1999)). Briefly, cell lysates, conditioned media or intact cells (1×10⁶ cells per 35-mm dish) are incubated for 18 hrs at 37° C., pH 6.2-6.6, with ³⁵S-labeled ECM or soluble ECM derived peak I proteoglycans. The incubation medium is centrifuged and the supernatant is analyzed by gel filtration on a Sepharose CL-6B column (0.9×30 cm). Fractions are eluted with PBS and their radioactivity is measured. Degradation fragments of heparan sulfate side chains are eluted from Sepharose 6B at 0.5<Kₐᵥ<0.8 (peak II). Each experiment is done at least three times. Degradation fragments corresponding to “peak II,” as described by Vlodavsky et al., is indicative of the activity of the polypeptides of the invention in cleaving heparan sulfate.

### Example 63

### Immobilization of Biomolecules

[1274] This example provides a method for the stabilization of polypeptides of the invention in non-host cell lipid bilayer constucts (see, e.g., Bieri et al., Nature Biotech 17:1105-1108 (1999), hereby incorporated by reference in its entirety herein) which can be adapted for the study of polypeptides of the invention in the various functional assays described above. Briefly, carbohydrate-specific chemistry for biotinylation is used to confine a biotin tag to the extracellular domain of the polypeptides of the invention, thus allowing uniform orientation upon immobilization. A 50 uM solution of polypeptides of the invention in washed membranes is incubated with 20 mM NaIO4 and 1.5 mg/ml (4mM) BACH or 2 mg/ml (7.5 mM) biotin-hydrazide for 1 hr at room temperature (reaction volume, 150 ul). Then the sample is dialyzed (Pierce Slidealizer Cassett, 10 kDa cutoff; Pierce Chemical Co., Rockford Ill.) at 4C first for 5 h, exchanging the buffer after each hour, and finally for 12 h against 500 ml buffer R (0.15 M NaCl, 1 mM MgCl2, 10 mM sodium phosphate, pH7). Just before addition into a cuvette, the sample is diluted 1:5 in buffer ROG50 (Buffer R supplemented with 50 mM octylglucoside).

### Example 64

### TAQMAN

[1275] Quantitative PCR (QPCR). Total RNA from cells in culture are extracted by Trizol separation as recommended by the supplier (LifeTechnologies). (Total RNA is treated with DNase I (Life Technologies) to remove any contaminating genomic DNA before reverse transcription.) Total RNA (50 ng) is used in a one-step, 50 ul, RT-QPCR, consisting of Taqman Buffer A (Perkin-Elmer; 50 mM KCl/10 mM Tris, pH 8.3), 5.5 mM MgCl₂, 240 μM each, dNTP, 0.4 units RNase inhibitor(Promega), 8% glycerol, 0.012% Tween-20, 0.05% gelatin, 0.3 uM primers, 0.1 uM probe, 0.025 units Amplitaq Gold (Perkin-Elmer) and 2.5 units Superscript II reverse transcriptase (Life Technologies). As a control for genomic contamination, parallel reactions are setup without reverse transcriptase. The relative abundance of (unknown) and 18S RNAs are assessed by using the Applied Biosystems Prism 7700 Sequence Detection System (Livak, K. J., Flood, S. J., Marmaro, J., Giusti, W. & Deetz, K. (1995) PCR Methods Appl. 4, 357-362). Reactions are carried out at 48° C. for 30 min, 95° C. for 10 min, followed by 40 cycles of 95° C. for 15s, 60° C. for 1 min. Reaction performed in triplicate.

[1276] Primers (f & r) and FRET probes sets are designed using Primer Express Software (Perkin-Elmer). Probes are labeled at the 5′ end with the reporter dye 6 FAM and on the 3′-end with the quencher dye TAMRA (Biosource International, Camarillo, Calif. or Perkin-Elmer).

### Example 65

### Assays for Metalloproteinase Activity

[1277] Metalloproteinases (EC 3.4.24.-) are peptide hydrolases which use metal ions, such as Zn²⁺, as the catalytic mechanism. Metalloproteinase activity of polypeptides of the present invention can be assayed according to the following methods.

### Proteolysis of alpha-2-macroglobulin

[1278] To confirm protease activity, purified polypeptides of the invention are mixed with the substrate alpha-2-macroglobulin (0.2 unit/ml; Boehringer Mannheim, Germany) in 1× assay buffer (50 mM HEPES, pH 7.5, 0.2 M NaCl, 10 mM CaCl₂, 25 μM ZnCl₂ and 0.05% Brij-35) and incubated at 37° C. for 1-5 days. Trypsin is used as positive control. Negative controls contain only alpha-2-macroglobulin in assay buffer. The samples are collected and boiled in SDS-PAGE sample buffer containing 5% 2-mercaptoethanol for 5-min, then loaded onto 8% SDS-polyacrylamide gel. After electrophoresis the proteins are visualized by silver staining. Proteolysis is evident by the appearance of lower molecular weight bands as compared to the negative control.

### Inhibition of alpha-2-macroglobulin Proteolysis by Inhibitors of Metalloproteinases

[1279] Known metalloproteinase inhibitors (metal chelators (EDTA, EGTA, AND HgCl₂), peptide metalloproteinase inhibitors (TIMP-1 and TIMP-2), and commercial small molecule MMP inhibitors) are used to characterize the proteolytic activity of polypeptides of the invention. The three synthetic MMP inhibitors used are: MMP inhibitor I, [IC₅₀=1.0 μM against MMP-1 and MMP-8; IC₅₀=30 μM against MMP-9; IC₅₀=150 μM against MMP-3]; MMP-3 (stromelysin-1) inhibitor I [IC₅₀=5 μM against MMP-3], and MMP-3, inhibitor II [Kᵢ=130 nM against MMP-3]; inhibitors available through Calbiochem, catalog # 444250, 444218, and 444225, respectively). Briefly, different concentrations of the small molecule MMP inhibitors are mixed with purified polypeptides of the invention (50 μg/ml) in 22.9 μl of 1× HEPES buffer (50 mM HEPES, pH 7.5, 0.2 M NaCl, 10 mM CaCl₂, 25 μM ZnCl₂ and 0.05% Brij-35) and incubated at room temperature (24° C.) for 2-hr, then 7.1 μl of substrate alpha-2-macroglobulin (0.2 unit/ml) is added and incubated at 37° C. for 20-hr. The reactions are stopped by adding 4× sample buffer and boiled immediately for 5 minutes. After SDS-PAGE, the protein bands are visualized by silver stain.

### Synthetic Fluorogenic Peptide Substrates Cleavage Assay

[1280] The substrate specificity for polypeptides of the invention with demonstrated metalloproteinase activity can be determined using synthetic fluorogenic peptide substrates (purchased from BACHEM Bioscience Inc). Test substrates include, M-1985, M-2225, M-2105, M-2110, and M-2255. The first four are MMP substrates and the last one is a substrate of tumor necrosis factor-α (TNF-α) converting enzyme (TACE). All the substrates are prepared in 1:1 dimethyl sulfoxide (DMSO) and water. The stock solutions are 50-500 μM. Fluorescent assays are performed by using a Perkin Elmer LS 50B luminescence spectrometer equipped with a constant temperature water bath. The excitation λ is 328 nm and the emission λ is 393 nm. Briefly, the assay is carried out by incubating 176 μl 1× HEPES buffer (0.2 M NaCl, 10 mM CaCl₂, 0.05% Brij-35 and 50 mM HEPES, pH 7.5) with 4 μl of substrate solution (50 tM) at 25° C. for 15 minutes, and then adding 20 μl of a purified polypeptide of the invention into the assay cuvett. The final concentration of substrate is 1 μM. Initial hydrolysis rates are monitored for 30-min.

### Example 66

### Characterization of the cDNA Contained in a Deposited Plasmid

[1281] The size of the cDNA insert contained in a deposited plasmid may be routinely determined using techniques known in the art, such as PCR amplification using synthetic primers hybridizable to the 3′ and 5′ ends of the cDNA sequence. For example, two primers of 17-30 nucleotides derived from each end of the cDNA (i.e., hybridizable to the absolute 5′ nucleotide or the 3′ nucleotide end of the sequence of SEQ ID NO:X, respectively) are synthesized and used to amplify the cDNA using the deposited cDNA plasmid as a template. The polymerase chain reaction is carried out under routine conditions, for instance, in 25 ul of reaction mixture with 0.5 ug of the above cDNA template. A convenient reaction mixture is 1.5-5 mM MgCl₂, 0.01% (w/v) gelatin, 20 uM each of dATP, dCTP, dGTP, dTTP, 25 pmol of each primer and 0.25 Unit of Taq polymerase. Thirty five cycles of PCR (denaturation at 94 degree C. for 1 min; annealing at 55 degree C. for 1 min; elongation at 72 degree C. for 1 min) are performed with a Perkin-Elmer Cetus automated thermal cycler. The amplified product is analyzed by agarose gel electrophoresis. The PCR product is verified to be the selected sequence by subcloning and sequencing the DNA product.

[1282] Use of the above methodologies and/or other methodologies known in the art generates fragments from the clone corresponding to the approximate fragments described in Table 8, below. Accordingly, Table 8 provides a physical characterization of certain clones encompassed by the invention. The first column provides the unique clone identifier, “Clone ID NO:Z”, for cDNA clones of the invention, as described in Table- A. The second column provides the approximate size of the cDNA insert contained in the corresponding cDNA clone.

TABLE 8

| | cDNA |
|---|---|
| Clone ID | Insert |
| NO: Z | Size: |
| HPFDV71 | 700 |
| HPFCP82 | 700 |
| HBZAI39 | 1100 |

[1283] It will be clear that the invention may be practiced otherwise than as particularly described in the foregoing description and examples. Numerous modifications and variations of the present invention are possible in light of the above teachings and, therefore, are within the scope of the appended claims.

[1284] The entire disclosure of each document cited (including patents, patent applications, journal articles, abstracts, laboratory manuals, books, or other disclosures) in the Background of the Invention, Detailed Description, and Examples is hereby incorporated herein by reference. In addition, the CD-R copy of the sequence listing submitted herewith and the corresponding computer readable form are both incorporated herein by reference in their entireties. The specification and Sequence Listing of each of the following U.S. applications are herein incorporated by reference in their entirety: Application No. 60/179,065, filed on Jan. 31, 2000; Application No. 60/180,628, filed on Feb. 4, 2000; Application No. 60/214,886, filed on Jun. 28, 2000; Application No. 60/217,487, filed on Jul. 11, 2000; Application No. 60/225,758, filed on Aug. 14, 2000; Application No. 60/220,963, filed on Jul. 26, 2000; Application No. 60/217,496, filed on Jul. 11, 2000; Application No. 60/225,447, filed on Aug. 14, 2000; Application No. 60/218,290, filed on Jul. 14, 2000; Application No. 60/225,757 , filed on Aug. 14, 2000; Application No. 60/226,868, filed on Aug. 22, 2000; Application No. 60/216,647, filed on Jul. 7, 2000; Application No. 60/225,267, filed on Aug. 14, 2000; Application No. 60/216,880, filed on Jul. 7, 2000; Application No. 60/225,270, filed on Aug. 14, 2000; Application No. 60/251,869, filed on Dec. 8, 2000; Application No. 60/235,834, filed on Sep. 27, 2000; Application No. 60/234,274, filed on Sep. 21, 2000; Application No. 60/234,223, filed on Sep. 21, 2000; Application No. 60/228,924, filed on Aug. 30, 2000; Application No. 60/224,518, filed on Aug. 14, 2000; Application No. 60/236,369, filed on Sep. 29, 2000; Application No. 60/224,519, filed on Aug. 14, 2000; Application No. 60/220,964, filed on Jul. 26, 2000; Application No. 60/241,809, filed on Oct. 20, 2000; Application No. 60/249,299, filed on Nov. 17, 2000; Application No. 60/236,327, filed on Sep. 29, 2000; Application No. 60/241,785, filed on Oct. 20, 2000; Application No. 60/244,617, filed on Nov. 1, 2000; Application No. 60/225,268, filed on Aug. 14, 2000; Application No. 60/236,368, filed on Sep. 29, 2000; Application No. 60/251,856, filed on Dec. 8, 2000; Application No. 60/251,868, filed on Dec. 08, 2000; Application No. 60/229,344, filed on Sep. 1, 2000; Application No. 60/234,997, filed on Sep. 25, 2000; Application No. 60/229,343, filed on Sep. 1, 2000; Application No. 60/229,345, filed on Sep. 1, 2000; Application No. 60/229,287, filed on Sep. 1, 2000; Application No. 60/229,513, filed on Sep. 5, 2000; Application No. 60/231,413, filed on Sep. 8, 2000; Application No. 60/229,509, filed on Sep. 5, 2000; Application No. 60/236,367, filed on Sep. 29, 2000; Application No. 60/237,039, filed on Oct. 2, 2000; Application No. 60/237,038, filed on Oct. 2, 2000; Application No. 60/236,370, filed on Sep. 29, 2000; Application No. 60/236,802, filed on Oct. 2, 2000; Application No. 60/237,037, filed on Oct. 2, 2000; Application No. 60/237,040, filed on Oct. 2, 2000; Application No. 60/240,960, filed on Oct. 20, 2000; Application No. 60/239,935, filed on Oct. 13, 2000; Application No. 60/239,937, filed on Oct. 13, 2000; Application No. 60/241,787, filed on Oct.20, 2000; Application No. 60/246,474, filed on Nov. 8, 2000; Application No. 60/246,532, filed on Nov. 8, 2000; Application No. 60/249,216, filed on Nov. 17, 2000; Application No. 60/249,210, filed on Nov. 17, 2000; Application No. 60/226,681, filed on Aug. 22, 2000; Application No. 60/225,759, filed on Aug. 14, 2000; Application No. 60/225,213, filed on Aug. 14, 2000; Application No. 60/227,182, filed on Aug. 22, 2000; Application No. 60/225,214, filed on Aug. 14, 2000; Application No. 60/235,836, filed on Sep. 27, 2000; Application No. 60/230,438, filed on Sep. 6, 2000; Application No. 60/215,135, filed on Jun. 30 2000; Application No. 60/225,266, filed on Aug. 14, 2000; Application No. 60/249,218, filed on Nov. 17, 2000; Application No. 60/249,208, filed on Nov. 17, 2000; Application No. 60/249,213, filed on Nov. 17, 2000; Application No. 60/249,212, filed on Nov. 17, 2000; Application No. 60/249,207, filed on Nov. 17, 2000; Application No. 60/249,245, filed on Nov. 17, 2000; Application No. 60/249,244, filed on Nov. 17, 2000; Application No. 60/249,217, filed on Nov. 17, 2000; Application No. 60/249,211, filed on Nov. 17, 2000; Application No. 60/249,215, filed on Nov. 17, 2000; Application No. 60/249,264, filed on Nov. 17, 2000; Application No. 60/249,214, filed on Nov. 17, 2000; Application No. 60/249,297, filed on Nov. 17, 2000; Application No. 60/232,400, filed on Sep. 14, 2000; Application No. 60/231,242, filed on Sep. 8, 2000; Application No. 60/232,081, filed on Sep. 8, 2000; Application No. 60/232,080, filed on Sep. 8, 2000; Application No. 60/231,414, filed on Sep. 8, 2000; Application No. 60/231,244, filed on Sep. 8, 2000; Application No. 60/233,064, filed on Sep. 14, 2000; Application No. 60/233,063, filed on Sep. 14, 2000; Application No. 60/232,397, filed on Sep. 14, 2000; Application No. 60/232,399, filed on Sep. 14, 2000; Application No. 60/232,401, filed on Sep. 14, 2000; Application No. 60/241,808, filed on Oct. 20, 2000; Application No. 60/241,826, filed on Oct. 20, 2000; Application No. 60/241,786, filed on Oct. 20, 2000; Application No. 60/241,221, filed on Oct. 20, 2000; Application No. 60/246,475, filed on Oct. 8, 2000; Application No. 60/231,243, filed on Sep. 8, 2000; Application No. 60/233,065, filed on Sep. 14, 2000; Application No. 60/232,398, filed on Sep. 14, 2000; Application No. 60/234,998, filed on Sep. 25, 2000; Application No. 60/246,477, filed on Nov. 8, 2000; Application No. 60/246,528, filed on Nov. 8, 2000; Application No. 60/246,525, filed on Nov. 8, 2000; Application No. 60/246,476, filed on Nov. 8, 2000; Application No. 60/246,526, filed on Nov. 8, 2000; Application No. 60/249,209, filed on Nov. 17, 2000; Application No. 60/246,527, filed on Nov. 8, 2000; Application No. 60/246,523, filed on Nov. 8, 2000; Application No. 60/246,524, filed on Nov. 8, 2000; Application No. 60/246,478, filed on Nov. 8, 2000; Application No. 60/246,609, filed on Nov. 8, 2000; Application No. 60/246,613, filed on Nov. 8, 2000; Application No. 60/249,300, filed on Nov. 17, 2000; Application No. 60/249,265, filed on Nov. 17, 2000; Application No. 60/246,610, filed on Nov. 8, 2000; Application No. 60/246,611, filed on Nov. 8, 2000; Application No. 60/230,437, filed on Sep. 6, 2000; Application No. 60/251,990, filed on Dec. 8, 2000; Application No. 60/251,988, filed on Dec. 5, 2000; Application No. 60/251,030, filed on Dec. 5, 2000; Application No. 60/251,479, filed on Dec. 6, 2000; Application No. 60/256,719, filed on Dec. 5, 2000; Application No. 60/250,160, filed on Dec. 1, 2000; Application No. 60/251,989, filed on Dec. 8, 2000; Application No. 60/250,391, filed on Dec. 1, 2000; Application No. 60/254,097, filed on Dec. 11, 2000; and Application No. 09/764,850, filed Jan. 17, 2001.

[1285] Moreover, the microfiche copy and the corresponding computer readable form of the Sequence Listing of U.S. Application Serial No. 60/179,065, and the hard copy of and the corresponding computer readable form of the Sequence Listing of U.S. Application Serial No. 60/180,628 are also incorporated herein by reference in their entireties.

What is claimed is:

1. An isolated nucleic acid molecule comprising a polynucleotide having a nucleotide sequence at least 95% identical to a sequence selected from the group consisting of:
(a) a polynucleotide fragment of SEQ ID NO:X or a polynucleotide fragment of the cDNA sequence contained in Clone ID NO:Z, which is hybridizable to SEQ ID NO:X;
(b) a polynucleotide encoding a polypeptide fragment of SEQ ID NO:Y or a polypeptide fragment encoded by the cDNA sequence contained in cDNA Clone ID NO:Z, which is hybridizable to SEQ ID NO:X;
(c) a polynucleotide encoding a polypeptide fragment of a polypeptide encoded by SEQ ID NO:X or a polypeptide fragment encoded by the cDNA sequence contained in cDNA Clone ID NO:Z, which is hybridizable to SEQ ID NO:X;
(d) a polynucleotide encoding a polypeptide domain of SEQ ID NO:Y or a polypeptide domain encoded by the cDNA sequence contained in cDNA Clone ID NO:Z, which is hybridizable to SEQ ID NO:X;
(e) a polynucleotide encoding a polypeptide epitope of SEQ ID NO:Y or a polypeptide epitope encoded by the cDNA sequence contained in cDNA Clone ID NO:Z, which is hybridizable to SEQ ID NO:X;
(f) a polynucleotide encoding a polypeptide of SEQ ID NO:Y or the cDNA sequence contained in cDNA Clone ID NO:Z, which is hybridizable to SEQ ID NO:X, having biological activity;
(g) a polynucleotide which is a variant of SEQ ID NO:X;
(h) a polynucleotide which is an allelic variant of SEQ ID NO:X;
(i) a polynucleotide which encodes a species homologue of the SEQ ID NO:Y;
(j) a polynucleotide capable of hybridizing under stringent conditions to any one of the polynucleotides specified in (a)-(i), wherein said polynucleotide does not hybridize under stringent conditions to a nucleic acid molecule having a nucleotide sequence of only A residues or of only T residues.

2. The isolated nucleic acid molecule of claim 1, wherein the polynucleotide fragment comprises a nucleotide sequence encoding a protein.

3. The isolated nucleic acid molecule of claim 1, wherein the polynucleotide fragment comprises a nucleotide sequence encoding the sequence identified as SEQ ID NO:Y or the polypeptide encoded by the cDNA sequence contained in cDNA Clone ID NO:Z, which is hybridizable to SEQ ID NO:X.

4. The isolated nucleic acid molecule of claim 1, wherein the polynucleotide fragment comprises the entire nucleotide sequence of SEQ ID NO:X or the cDNA sequence contained in cDNA Clone ID NO:Z, which is hybridizable to SEQ ID NO:X.

5. The isolated nucleic acid molecule of claim 2, wherein the nucleotide sequence comprises sequential nucleotide deletions from either the C-terminus or the N-terminus.

6. The isolated nucleic acid molecule of claim 3, wherein the nucleotide sequence comprises sequential nucleotide deletions from either the C-terminus or the N-terminus.

7. A recombinant vector comprising the isolated nucleic acid molecule of claim 1.

8. A method of making a recombinant host cell comprising the isolated nucleic acid molecule of claim 1.

9. A recombinant host cell produced by the method of claim 8.

10. The recombinant host cell of claim 9 comprising vector sequences.

11. An isolated polypeptide comprising an amino acid sequence at least 90% identical to a sequence selected from the group consisting of:
(a) a polypeptide fragment of SEQ ID NO:Y or the encoded sequence contained in cDNA Clone ID NO:Z;
(b) a polypeptide fragment of SEQ ID NO:Y or the encoded sequence contained in cDNA Clone ID NO:Z, having biological activity;
(c) a polypeptide domain of SEQ ID NO:Y or the encoded sequence contained in cDNA Clone ID NO:Z;
(d) a polypeptide epitope of SEQ ID NO:Y or the encoded sequence contained in cDNA Clone ID NO:Z;
(e) a full length protein of SEQ ID NO:Y or the encoded sequence contained in cDNA Clone ID NO:Z;
(f) a variant of SEQ ID NO:Y;
(g) an allelic variant of SEQ ID NO:Y; or
(h) a species homologue of the SEQ ID NO:Y.

12. The isolated polypeptide of claim 11, wherein the full length protein comprises sequential amino acid deletions from either the C-terminus or the N-terminus.

13. An isolated antibody that binds specifically to the isolated polypeptide of claim 11.

14. A recombinant host cell that expresses the isolated polypeptide of claim 11.

15. A method of making an isolated polypeptide comprising:
(a) culturing the recombinant host cell of claim 14 under conditions such that said polypeptide is expressed; and
(b) recovering said polypeptide.

16. The polypeptide produced by claim 15.

17. A method for preventing, treating, or ameliorating a medical condition, comprising administering to a mammalian subject a therapeutically effective amount of the polynucleotide of claim 1.

18. A method of diagnosing a pathological condition or a susceptibility to a pathological condition in a subject comprising:
(a) determining the presence or absence of a mutation in the polynucleotide of claim 1; and
(b) diagnosing a pathological condition or a susceptibility to a pathological condition based on the presence or absence of said mutation.

19. A method of diagnosing a pathological condition or a susceptibility to a pathological condition in a subject comprising:
(a) determining the presence or amount of expression of the polypeptide of claim 11 in a biological sample; and
(b) diagnosing a pathological condition or a susceptibility to a pathological condition based on the presence or amount of expression of the polypeptide.

20. A method for identifying a binding partner to the polypeptide of claim 11 comprising:
(a) contacting the polypeptide of claim 11 with a binding partner; and
(b) determining whether the binding partner effects an activity of the polypeptide.

21. The gene corresponding to the cDNA sequence of SEQ ID NO:Y.

22. A method of identifying an activity in a biological assay, wherein the method comprises:
(a) expressing SEQ ID NO:X in a cell;
(b) isolating the supernatant;
(c) detecting an activity in a biological assay; and
(d) identifying the protein in the supernatant having the activity.

23. The product produced by the method of claim 20.

24. A method for preventing, treating, or ameliorating a medical condition, comprising administering to a mammalian subject a therapeutically effective amount of the polypeptide of claim 11.

The application's sequence listing, which the Patent Office published only in electronic form, follows.

SEQUENCE LISTING (927 sequences)

SEQ ID NO: 1 - DNA, 733 bp, Homo sapiens
gggatccggagcccaaatcttctgacaaaactcacacatgcccaccgtgcccagcacctgaattcgagggtgcaccgtcagtcttcctcttccccccaaaacccaaggacaccctcatgatctcccggactcctgaggtcacatgcgtggtggtggacgtaagccacgaagaccctgaggtcaagttcaactggtacgtggacggcgtggaggtgcataatgccaagacaaagccgcgggaggagcagtacaacagcacgtaccgtgtggtcagcgtcctcaccgtcctgcaccaggactggctgaatggcaaggagtacaagtgcaaggtctccaacaaagccctcccaacccccatcgagaaaaccatctccaaagccaaagggcagccccgagaaccacaggtgtacaccctgcccccatcccgggatgagctgaccaagaaccaggtcagcctgacctgcctggtcaaaggcttctatccaagcgacatcgccgtggagtgggagagcaatgggcagccggagaacaactacaagaccacgcctcccgtgctggactccgacggctccttcttcctctacagcaagctcaccgtggacaagagcaggtggcagcaggggaacgtcttctcatgctccgtgatgcatgaggctctgcacaaccactacacgcagaagagcctctccctgtctccgggtaaatgagtgcgacggccgcgactctagaggat

SEQ ID NO: 2 - protein, 5 aa, Homo sapiens
  misc_feature (3): Xaa equals any of the twenty naturally occurring L-amino acids
WSXWS

SEQ ID NO: 3 - DNA, 86 bp, Artificial Sequence
  Synthetic sequence with 4 tandem copies of the GAS binding site found in the IRF1 promoter (Rothman et al., Immunity 1:457-468 (1994)), 18 nucleotides complementary to the SV40 early promoter, and a Xho I restriction site.
gcgcctcgagatttccccgaaatctagatttccccgaaatgatttccccgaaatgatttccccgaaatatctgccatctcaattag

SEQ ID NO: 4 - DNA, 27 bp, Artificial Sequence
  Synthetic sequence complementary to the SV40 promoter; includes a Hind III restriction site.
gcggcaagctttttgcaaagcctaggc

SEQ ID NO: 5 - DNA, 271 bp, Artificial Sequence
  Synthetic promoter for use in biological assays; includes GAS binding sites found in the IRF1 promoter (Rothman et al., Immunity 1:457-468 (1994)).
ctcgagatttccccgaaatctagatttccccgaaatgatttccccgaaatgatttccccgaaatatctgccatctcaattagtcagcaaccatagtcccgcccctaactccgcccatcccgcccctaactccgcccagttccgcccattctccgccccatggctgactaattttttttatttatgcagaggccgaggccgcctcggcctctgagctattccagaagtagtgaggaggcttttttggaggcctaggcttttgcaaaaagctt

SEQ ID NO: 6 - DNA, 32 bp, Artificial Sequence
  Synthetic primer complementary to human genomic EGR-1 promoter sequence (Sakamoto et al., Oncogene 6:867-871 (1991)); includes a Xho I restriction site.
gcgctcgagggatgacagcgatagaaccccgg

SEQ ID NO: 7 - DNA, 31 bp, Artificial Sequence
  Synthetic primer complementary to human genomic EGR-1 promoter sequence (Sakamoto et al., Oncogene 6:867-871 (1991)); includes a Hind III restriction site.
gcgaagcttcgcgactccccggatccgcctc

SEQ ID NO: 8 - DNA, 12 bp, Homo sapiens
ggggactttccc

SEQ ID NO: 9 - DNA, 73 bp, Artificial Sequence
  Synthetic primer with 4 tandem copies of the NF-KB binding site (GGGGACTTTCCC), 18 nucleotides complementary to the 5' end of the SV40 early promoter sequence, and a XhoI restriction site.
gcggcctcgaggggactttcccggggactttccggggactttccgggactttccatcctgccatctcaattag

SEQ ID NO: 10 - DNA, 256 bp, Artificial Sequence
  Synthetic promoter for use in biological assays; includes NF-KB binding sites.
ctcgaggggactttcccggggactttccggggactttccgggactttccatctgccatctcaattagtcagcaaccatagtcccgcccctaactccgcccatcccgcccctaactccgcccagttccgcccattctccgccccatggctgactaattttttttatttatgcagaggccgaggccgcctcggcctctgagctattccagaagtagtgaggaggcttttttggaggcctaggcttttgcaaaaagctt

SEQ ID NO: 11 - DNA, 343 bp, Homo sapiens
  misc_feature (273): n equals a,t,g, or c
  misc_feature (300): n equals a,t,g, or c
  misc_feature (337): n equals a,t,g, or c
gggtcgacccacgcgtccggctttccaaatagcatgtttaactcagacaaattccagtttcacagaggatatgagaaggaaaaaaaatccacagcaagaatacaacaaagaaggattcattttacattcgttctgattaagaatatctttcagtttatgataaaatcarcgataatattgttaaaaactggacctaattactttcaaccagatactgtccaaacattaactttttccatcaaaagtatccctgatagttactttgtaaaatgnaaagcacatttggcttccatttctgangtggttaaaataaaggctaccgggttgggataacttnaaaaaa

SEQ ID NO: 12 - DNA, 398 bp, Homo sapiens
  misc_feature (355): n equals a,t,g, or c
  misc_feature (372): n equals a,t,g, or c
  misc_feature (376): n equals a,t,g, or c
  misc_feature (384): n equals a,t,g, or c
acccacgcgtccgcccacgcgtccgattttatttaaaaaaaaaaactgagatacagagggggaaaatgattttctgagggcattagagataaagccatagtcaaacagatcaaggccccagatccagagtcatttctaatacaccacacactgcctccaaagttttttcatttcaattgttaaattatctcagaaagaaaaaaataatacattaaaggatgcagtatgatcatatgatgagcttcttttctacgtaactttatattgctgttgtaaccttggttttaagaaaagttaaagctctctctttcctgattattattagattttgtgttccatggaatgttttgaaaanttaataactaagacacnggantggagagnttttaaacaaattt

SEQ ID NO: 13 - DNA, 302 bp, Homo sapiens
  misc_feature (267): n equals a,t,g, or c
  misc_feature (270): n equals a,t,g, or c
  misc_feature (294): n equals a,t,g, or c
caactgagtcctctgattgtgtaaacaatttgcctgcaaacaaaacctgagtgcttgaaagggtaagtgatcctgatctgccatagaaaccttcatgcttagggagtttccctagctaattcctcagctaagattctccccaggagtttcactcacctgtttccagtgcctcctttgggctgtcagcatctgtgattccacattccccagagggagattcctccccaaagctggttgtatttactgccagtcctgggctgtagccanggnagtctttgaacacattatcaagantacttttt

SEQ ID NO: 14 - DNA, 353 bp, Homo sapiens
  misc_feature (138): n equals a,t,g, or c
  misc_feature (141): n equals a,t,g, or c
  misc_feature (322): n equals a,t,g, or c
acccacgcgtccggcagttcctacttttagacgcatggtggcgctagggtctcctccggccctgctagcaatctctaaggcacctccgccgccacctgcagtctcaaccaaacctctgggtggggcagcgcgggattnganaggccgagcgtccaatcgactgacagatttccgtccacactactgctctagccaatgggagccgaggagaggcgcggaggaggcgggccccgcgggcaagcctgggcagaggcgcgaggccctcctcccgcctctccgcctaattccagcctccgccgcctcagctttcccgagcgagccntgcggccgttttagagggattccaagtttta

SEQ ID NO: 15 - DNA, 324 bp, Homo sapiens
cgttagcgaggtgccgccggcttccattcaggtcgaggtggcccggctccatgcaccgcgacgcaacggggtgaggcagacaaggtatagggcggcgcctacaatccatgccaacccgttccatgtgctcgccgaggcggcataaatcgccgtgacgatcagcggtccaatgatcgaagttaggctggtaagagccgcgagcgatccttraagctgtccctgatggtcgtcatctacctgcctggacagcatggcctgcaacgcgggcatcccgatgccgccggaagcgagaagactcgtgccgaattcggcacgagcagcttt

SEQ ID NO: 16 - DNA, 331 bp, Homo sapiens
  misc_feature (317): n equals a,t,g, or c
  misc_feature (327): n equals a,t,g, or c
aattcggcacgagaagaattgtgcattgaaactgccaagcttaaataatgaagttcgacaaatatgattaagtacagagtttatttgagcacaaagcttgaggatgtccacccacgagacactgactccaaactaatggggacagcatttccaaagaggagaagttatggtttcacttatatgtgcagagactgacattgtagcaggattgtaacattttccatatgagacgggtgcctataatcctagctacttagggaggcttgaggccaggagaatccattttgaacccagggagggcgtagggatgccagttnagcccaaggntcgg

SEQ ID NO: 17 - DNA, 319 bp, Homo sapiens
  misc_feature (226): n equals a,t,g, or c
  misc_feature (274): n equals a,t,g, or c
  misc_feature (288): n equals a,t,g, or c
aattcggcacgagaaaagaaatttcttcacagttacagaggctgagaagtcccaggtcaaggggtcctatctggtgacagccttcttgcttgaggggactctctgaagagtactaaggtggtccaaggtgtcgcatggtgagggggctgagtgtgctaacatgttagctcaggtctttgttcttcttataaagccatcagtccccactcattataacccattaatncatgagttggattaatccacttcatggatttaaaccccatttcatttngggcagagcctccnatggattgcaaagcacccgttttaaaggacc

SEQ ID NO: 18 - DNA, 349 bp, Homo sapiens
  misc_feature (283): n equals a,t,g, or c
  misc_feature (288): n equals a,t,g, or c
  misc_feature (319): n equals a,t,g, or c
aattcggcacgagcttcatcagcttagcttgtcctcttgcagcctacgccactctgtgccctttagccaaggaagcccagctgaggccccgcagcgtccctgcccagcagagctacaggaggcccgaggccccttcctgttcactcttgctctatagacgccacgctgcaaagagatgtgcagggacaccacctgaagacccagcctgcagctcagccctacacactgtggatggtggagatcccagaggccaagagaagcttattgagacttctctgcactnccttncacagcaggaggttcatggccatgcattttnggagggttacaaggccaggtgtggaatact

SEQ ID NO: 19 - DNA, 235 bp, Homo sapiens
  misc_feature (121): n equals a,t,g, or c
  misc_feature (231): n equals a,t,g, or c
aattcggcacgagctttcatatcctgacgcgctggaaggaagtttkgtacgagtggaaccagccgcatttccaagttcgttctgtgagactgtagtgtcaggacaaagcaacaacaaaatntgctctactctaaagaagtgtgggacatacagaactgaagttgcagaatgccatgaccatggtagcacttttcaaggaagaaagaaaggtgggagttctttccgggatantttt

SEQ ID NO: 20 - DNA, 258 bp, Homo sapiens
aattcggcacgagcaggaaaccccaattacacggtaaggcctttctcagaatgggtgagatggattagaggagggaggtgagagccctttcatgtttacttagcaccctagaaagacctggaggaggtgctttaaacctgagatatacaaaataagtagtcaatgaagaagcttccatttgcctcaatggaagacctyctctctgcagtgtctkccccatccaacaggaatggtatcttttggaagtgcctcaaatcc

SEQ ID NO: 21 - DNA, 244 bp, Homo sapiens
  misc_feature (193): n equals a,t,g, or c
tttttttctaaaatattataaatttagaaaaattttgcaaacagaaaacactgtagggacaatatatgataagtaaattgtacttcagcaactcattgctttttagataccactgaattatttgcactaatggaggaacattgttataccaacctatttatatttgatccacattttaagattcctgttcagnttatttactttcttacttatggcttatctggattcttaattaacgttagtc

SEQ ID NO: 22 - DNA, 305 bp, Homo sapiens
ggcagaggctccaatgccactcctctacaatgatagccagccacactgggaattctgttccacagaatctcatggttatgtcactcaaatgcctcatccaaagtctggcccatagagggtacacaactattttcctttctgccaattgcttactgtcttcttgcggatttgaggactgtggcttgggtaagcacttggatggtacaccagttaagatgaggaactgaacaaccatgaagggaaaagaaggtgggctgcggagagttcagtcacctgagcagttgtctagaaaactagtttctagg

SEQ ID NO: 23 - DNA, 437 bp, Homo sapiens
atttttaaaaagtgctcaaagcatctatttttcatagctgtgcaaaagtaaaagaaataatattcatttttcacttcatgcaagaacctcacttgcatgaggttctcggaaatagaaaatcataatcaggacaacttgtcacttcttcagatgttttatatagaatatcatttggcttctaaatctgtgattccttttttgtctgtggctccagattttcataatctrccactattaagcagaagtggtaatttatgaagaaatttgggtttgaaatgcttattattttcatgaagataaaaagtaaaataagaatgttaaccatttgagtcctgttgctgaagggcattgagaggagttgagccccatctctctctcccattgcagtagttcctcttaaagtctcccttaccatcttaaaaaaaaaaaaaaaaacc

SEQ ID NO: 24 - DNA, 552 bp, Homo sapiens
  misc_feature (26): n equals a,t,g, or c
  misc_feature (394): n equals a,t,g, or c
  misc_feature (467): n equals a,t,g, or c
  misc_feature (507): n equals a,t,g, or c
  misc_feature (545): n equals a,t,g, or c
ttgctcatcttcgccacacggtgggntcttatcacatgcttagtgcctgctcttttcctgcttgcgctcaaggcggtttcggaggggtagggtatgccgtttgtcccttgcaaatcccaggatgccctacatccagaaatctggccatgcaaggcaaagcccacattttktcaccagccagcctgggttcaaatgccgtttaagagctgtgatcgtctctgggtctcttcagcagtaaaatgggactgcaaacccagatcaccatgcacgtggtaaaatttgtaggagataagttatgtgaagctcggggctgaggccctgtgtagggcccagttcctagttcctaagacggcttcctcgagctgaaaggaaccagcccagtgtagtcttatgnataagagggtggggacccagtcttaagagcagaaccaagaatgagagctgagctacgtgcagagtgcagagtncctgctgtgagctctgccccaacccaggctggaaaagttnctgtctgcccttgggtggaaggttgcattagcagaagnagtatag

SEQ ID NO: 25 - DNA, 443 bp, Homo sapiens
  misc_feature (406): n equals a,t,g, or c
attgccaatgataaaatttgaactttcaagcaaaaatgcaaattttggaaaatgtgttatttctgccactgagaacataacagcataccaacacttttagactttttacttttatattgtataatgaatgcatcaacatttggatgatctgtattacaggtgaaccaacattttccagtattagtggtggggaatgaccgtgtcwgaaggcttgaccaggatggggatagctcaaggaggcaggatggctcattgcttatgtcttcttcaggaacacaatgaagtaggttgagtttccaggatttggcccctgcattggggatggttggaggaaaggccaaaaacctaggttcttycagsccatgggctttaaaaaacgtggtactttttaaggaacagggttcanggcaggggtgtttttggggctagggttaaggaaaatg

SEQ ID NO: 26 - DNA, 289 bp, Homo sapiens
  misc_feature (280): n equals a,t,g, or c
  misc_feature (281): n equals a,t,g, or c
aattcggcagagatcacagttgtcacatcagcaggctagaaaagccatcccattcctgcggtaggcattctgtcaaagaaaaagaaatctgcaatgaattatcacatgaagtcaaacaaggaaaggaggcaaaaagcaagcagagccctcttcctgttttgtagactctgctggctacaatctaatagaatgcttgaatctggagtatttctggtgggcaaaactatagcaaccwttctgtctattaaaaagtcagtgtggttaaaaaaaaaaaaaaaannaaaggaaa

SEQ ID NO: 27 - DNA, 365 bp, Homo sapiens
  misc_feature (341): n equals a,t,g, or c
  misc_feature (348): n equals a,t,g, or c
catccgagcaatgctgccaaggggatgtttggtcttttaaattgtgatgacaaaataaacttttatgaaccctcttgctcaataaacacagcctggcattttaaatgttagcacatctcaattttgtgagagggtctgcctgagaggattgacttgaaactacacagcaaagaggaggtgctagtccacatttgcgtgttccatttgcatgagcaaaatggacctgcaagatggagctgcagcaagaggggaggcacatgtccaatagcaaggaagccatcaggatcctttattcttgaaggggtatgcaacagacttggaaggatctcatttttctttgntttaaangctttgggtaaaagtaa

SEQ ID NO: 28 - DNA, 357 bp, Homo sapiens
  misc_feature (331): n equals a,t,g, or c
  misc_feature (334): n equals a,t,g, or c
  misc_feature (353): n equals a,t,g, or c
aattcggcacgagtggaagaataattcacagtaatattaatcacatcagtaagtattgattaggcactttaacatcagttaatggccgggcgtggtggctcacctctgtaatctgagcactttgggaggccaaggtgggcagatcgcctgagctcaggagttcgagaccagcctgggtgacatggtgaaatcctgtctctacaaaaaaatacaaaaaattagccaggcatggtggcatgcacctgcggccccagcttacttgggaggcttgaggtgggaggatcacttgagcctgggaggtcaaggctgcagtgagctgagatcggaccantgntttccagccttggtgacanaggg

SEQ ID NO: 29 - DNA, 412 bp, Homo sapiens
  misc_feature (62): n equals a,t,g, or c
  misc_feature (371): n equals a,t,g, or c
  misc_feature (410): n equals a,t,g, or c
aattcggcacgagacgcagcaccatgcagctcagtcccaacctgtcgcaggacccggcgcgnctgcctagaggacccgaggcaggagttgggggcggggaggtggagctgcgccatccaggggctgccgagtggagggtcggaagtttccctctagggtctggatcaacaaagcacccgayttaatgcgmtgggrgagtgattcatgaaaagaaatttaaagctagccctgtktgcattatcagcccaaccctgcttttttttagtcctagttctttactaaaatctcctgcaaggctgagatttactataagtccagtgggttcctgtttagtccacagaaaagtggggccgggtggaagaattcaaggnccgcgagcagaagctttttttcccatttaagggtgtttnca

SEQ ID NO: 30 - DNA, 353 bp, Homo sapiens
  misc_feature (172): n equals a,t,g, or c
  misc_feature (310): n equals a,t,g, or c
  misc_feature (342): n equals a,t,g, or c
aattcggcacgagggatatggtatgagatgcacttgatttctggaatgtggctgacactgccacaagaaccttaataaaaccacaaacctaatggccaactaaaacgagaaagaaaaacatagggaggagacctgtgataatttggacatttggctgatttcagtgaaagantaaaatatgacccctaagagtgtccatttctcctaatcagcctgcagagctgctgaatatgtcttaaagaggcccattttggaaacctcttgaggtttccaataatccatggatttatcttcattggtcttgcacttntaaggacttccaaagggttttttttttttttngggggggaaaa

SEQ ID NO: 31 - DNA, 343 bp, Homo sapiens
  misc_feature (218): n equals a,t,g, or c
  misc_feature (301): n equals a,t,g, or c
  misc_feature (337): n equals a,t,g, or c
aattcggcacgagagaataccaagttaaacttcttaattagaatcaggaatcaggactctttggctgctgattgarggaagaactgtccttaaatccagagtgggccgggcatggtggctcatgcctgtaatcctagcactttgggaggccaaggcagatggatcacctgaggtcaggagttcaagagcagcatgaccaacatggtgaaccccatctntactgaaaatacaaaaattagccgggcgtggtggtgtgtgcctatagtcccagatacttcggaggcttgagataggagaattncttgaacctgggaggtggaggttatgtgagccaagnttaagg

SEQ ID NO: 32 - DNA, 358 bp, Homo sapiens
  misc_feature (54): n equals a,t,g, or c
  misc_feature (357): n equals a,t,g, or c
aattcggcacgagaaagaatctaagctggtcatcaggtgaccaaggttttggtnaggactcgtctacttgcttggtggttgatttcagggaagtaacctacattatctgttactgtttggtcttctcagtggaaagttctctcatcacattaggctcttaatatgacaaaaagaaacttaggaaagcagtttttaaaaagcaaagtttattcttgttttgtttctgtttggctgcttatcatacagcagaacagactactgaaaactggacattcaaagcctgaatttcaagacctcacacttgacacttccatggaagcaggcaaagrctcaggtgcaggcaagggaagggggttnc

SEQ ID NO: 33 - DNA, 240 bp, Homo sapiens
  misc_feature (234): n equals a,t,g, or c
aattcggcacgaggagtctctgagcaagttaatctccctatgatgcctcatctaccacatataaagcttggctgaaaatgtaataatctctatggtctttttcagctctaataccacatgtgactctagactgtgccactaagtgaatcttgctgtacctaagtgggtggcttagagctaagaggctcttgactggagagcaggcgtgacctgagccactgatctctgccctcnamatta

SEQ ID NO: 34 - DNA, 370 bp, Homo sapiens
  misc_feature (204): n equals a,t,g, or c
  misc_feature (306): n equals a,t,g, or c
  misc_feature (320): n equals a,t,g, or c
aattcggcagagccactacataatatttcaacaagggctccagcttgagtctgactatttgtaaccttaagacacattggcttggatgggtgcaaaggacacaaggrtttgcaatwggaccaagwaacatctagggtcagactcagtttaaggcagctgctcccaagcctggcagcacgttaacatcactgaggccatctaggncccactccagagcaattaaatcagaatttctggaggtgaagtgcagacaccggtattttcttttaaagtatcctaggggaccttaatgtgccagtggggttnagaaccacttaggntaagggaaacagaacttcaaggtgggacattttgggtcccaagggcagtt

SEQ ID NO: 35 - DNA, 319 bp, Homo sapiens
  misc_feature (201): n equals a,t,g, or c
tcaggacatccatcgggtggaaactgctgcactcccccacccgttcaggccactggagtgtcaccaaaccaccagggctgcccctgctggagtagctcacctgggtaactctgaggacaagmccccttggagactcttctcaggagggaggtggcattttccaagaaagggttcaacacagacctctgagtcagaggaccngttaaagagaaaattattctgrctttattcaggaatgttgctgtaggggtcgtggttattgccatgcggggggttgcccttgaggcagctgggagtggctcacggctgtaagtcccag

SEQ ID NO: 36 - DNA, 377 bp, Homo sapiens
  misc_feature (358): n equals a,t,g, or c
aggtcaagtatgctactaatgctttgcacggactttattcctttttttctttaggaaaataagttttgattcaaaatggaaagccaaacatacatttsctccaccaaccttagcaattggaaggggaccatttctcctcccctcttacaatgatagtgtatacgtttaggaggaaaagaccagaaaaagacatttctggtggcagtaggaaggaaatgaragacaaataaacatcttgactaaaaaggtaaaagagtatacccaatggcytaattcagaggacattaaagaggagtggagttatctccagtagcatggaagaggaaggaggaaagcattcttccattgggcagaattnggttggggttttcttttct

SEQ ID NO: 37 - DNA, 277 bp, Homo sapiens
  misc_feature (152): n equals a,t,g, or c
  misc_feature (233): n equals a,t,g, or c
aattcggcacgagccctcctcggcctcccagagtgctgggattacaggcgtgacactgtgcccggccccaggtcaattttrattgatttttcccatctctccatatgggtcataatgtcctgcctsttttcatgcctgtttttttgtttttngtttttcccggatattcaatattttgtattctaccttgtttggtgctggatatttttgtaaacctatacatatctttgcanttgtttctcgaatgtgatcaagttacttgggaaaaaaaaaaaaa

SEQ ID NO: 38 - DNA, 307 bp, Homo sapiens
atctttagtatattgagcctttgaatccatgaacatggtggtacatcttttaggtctatgatttctttcatcagcattttatagttttcaccatataaaatctgtgtgtattttgttaagtgtacacttatttaagtatttcactttctttggagtgattgtaaaatatattgtttgtttaatttcagttttcacatatttattgcaactgaccagaaaatgaaaggggattgtctttttgtgtgttggacattatttccccaagaccttgctcaacttatttgggkatttgcttttgagtgtgttg

SEQ ID NO: 39 - DNA, 401 bp, Homo sapiens
  misc_feature (363): n equals a,t,g, or c
  misc_feature (381): n equals a,t,g, or c
  misc_feature (398): n equals a,t,g, or c
aattcggcacaggkagtttgagttttaggcacatcctttatggaatataaacaggaacctaaaagttcattctgaacataggttgtttctttctgccaaaacaagattaatagtcagtaccctaacgacaaggtcctatcactgaagtagattatcggctagtcaaatgggttcctaacagcacctccctcatgggttaaaacaagagggttaatgtgatgtgtatttgcttaatttgggttgttatacagtaaacacacagcaaacgttagctattgttatcttcatttcctttggggaagttatcttatttctcaccykatttaaaaataaaccctaacttcaacaggggccctccttacnttggtccttttcaccctngatacccttataacctntat

SEQ ID NO: 40 - DNA, 466 bp, Homo sapiens
  misc_feature (463): n equals a,t,g, or c
aattcggcacgagggaaaatcaggttgaccacaacttctgtagttcttgagggaagaagggaagtataatgatgttggaagtcaaaatattgacattaagatagccaagtggagttttattatgtatgtatgcatgtagacatgattgaaatgtatattacaagctcatatgacatacctttataatagagaggtacctgtggattctaccttacttttgttagtgttttcactgtttcatgtgagttttacaatgaacctgtgagatttgcagagttaagagttatatacccgtctatggtagaaaacacaggttcattcagaggagtaaaagtggcttgcttggagatctgtgtccagtgggtagtcttcttgactagtgtttcacagagttgttttgcccwagaaagttagagcctgggccagmcggggttggtcaggctgtaaatccccagcacttttnggg

SEQ ID NO: 41 - DNA, 403 bp, Homo sapiens
  misc_feature (56): n equals a,t,g, or c
  misc_feature (244): n equals a,t,g, or c
  misc_feature (403): n equals a,t,g, or c
aattcggcacgacctgaaaactaaatgggattactaccaaaatagatacacatgtncaacattccaaccattttcctatggaaaaaccagtgttgaaacatacagtgtgttttcagttgactgagataaaatagcctgagggaatgtcatttgtacatggatcaagtttcaaaatactacttgcaactttctctctcttgagaagcagcaccccccacttcactgctgcttaaccatttttttnctaatgcagttttccttaacaacagagggaaggaaaactctgtagccctagggatctgaggaacatcatcaaagtggtctattcttaaagtggaaagtttttatttaatatttgtgtttcatgtatatataattagggacatatttataggattaggtn

SEQ ID NO: 42 - DNA, 325 bp, Homo sapiens
  misc_feature (125): n equals a,t,g, or c
aggctattttgaatgacagaaaagaatgacacttcttgttgtggagacctcttcacacgaaatggagttatgaaatgcctgggaaagaggttgcagcacagaatatatttgggagtgaactaggnaagaaggcaaattgaggctaggccatgaagaactattaagaaatttagtagttttttcattgtagaatatttacttttaaaaagcaaaaaargaaattaaaatgactcataataccactactcacggataatcactgttaacatgtgcagtgtcatccmtccagttctttatacacactcacacaagcaccaaggaatgg

SEQ ID NO: 43 - DNA, 648 bp, Homo sapiens
  misc_feature (533): n equals a,t,g, or c
  misc_feature (568): n equals a,t,g, or c
  misc_feature (596): n equals a,t,g, or c
  misc_feature (619): n equals a,t,g, or c
  misc_feature (642): n equals a,t,g, or c
  misc_feature (643): n equals a,t,g, or c
taattcggcacaggaaccactgttccttacaggtaagccagcatgatagttagaccaaaccatcccaatagagacttggcatgcattcaacaaacatcccaggtgcctagggtgtgcccagcaccattccaggagctgccagtaaaggaaacaagactgctgtgtggccaggtgcggtggctcacatctgtaatctcagcactttggaatgccgaagtgagtggatcacctgaggtcaggagttcaagaccagcctggccaacatggtgaaaccccatctctactaaaaaaaaaaaaactcgagggggggcccggtacccaattcgccctatagtgagtcgtattacaattcactggccgtcgttttacaacgtcgtgactgggaaaaccctggcgttacccaacttaatcgccttgcagcacatccccctttcgccagctggcgtaatagcgaagaggcccgaccgatcgcccttcccaacagttgcgcaacctgaatggcgaatggcaaattgtaagcgttaatattttgntaaaattcgcgttaaaatttttggtaaatcagctnattttttaaccaataggccgaaatcggnaaaatccctttataaatcaaaangaatagaccgagatagggttgannggttg

SEQ ID NO: 44 - DNA, 324 bp, Homo sapiens
  misc_feature (2): n equals a,t,g, or c
  misc_feature (316): n equals a,t,g, or c
tnttttctaaaggcctgacactgattggtacatggagtacagcctgaagggaacaagacttgttagaaaggaagctattgactgggtgtggtggctcgtgcctatgaatcccagcactttgggaggctgaggtgggcagattacttgaggccaggagttcgagatcagcctggccaacacggtgaaccccgtctctactaaaaatacaaaaattagcaggttgtggtggtgagcacctataatcccagctgcttgggaggctgaggcaggacaattgcttgaacctggggaggytgaggttgcagttagcccagantggggcat

SEQ ID NO: 45 - DNA, 316 bp, Homo sapiens
agagaaaaccaagctttaaataaatgacaaagattattttaaaattaatttggaaggaaaaatatgcgagattgctaatctttttttaagttgaatgagaggagactttcttcaccagatattaaaactgaccataaagctataataatcaaaatggcatggcattgccacagagttaaatcagtgaaaaattattgaaaatctaggaaaacattaccagtatatgtgggaaagttagcacttgctaaaaatggcattttaattgagtaaaagaaggctcctaataggcagagttgctatctggttgggaaaaatt

SEQ ID NO: 46 - DNA, 339 bp, Homo sapiens
  misc_feature (338): n equals a,t,g, or c
aattcggcagaggaagaaaaaaagaatgaatcaactcttaatgactgsctcctactgctgagctctctggactagtcacttcatttatattttctcattttctttattccttactatatttctctkaagtgtcattcccatttcatagttgaggaagctgggactcaggaggattaataacttgtccagcgttacaaagtgagtttaggagccacaattcagattcagatttattgactccaaaatttttgcaggttttaccatagcatgttgcttcagaaattaaacagacctggctgcaaaccccagacccaattactctgtggccttttaaacang

SEQ ID NO: 47 - DNA, 305 bp, Homo sapiens
aggattaaaggctggaaggcactggatgcctgatgatgaagtggactttcaaactggggcactactgaaacgatgggatggccagagacacaggagatcagttggagcaagctcaataacaaagtgrttcaacgaggacttgggaattgcatggagctggagctgaagtttagcccaattgtttactagttgagtgaatgtggatgattggatgatcatttctcatctctgagcctcaggttccccatccatgaaaatggggttacacagtatggatctattaaagtggggattattagttatgg

SEQ ID NO: 48 - DNA, 357 bp, Homo sapiens
  misc_feature (323): n equals a,t,g, or c
  misc_feature (335): n equals a,t,g, or c
aattcggcacgagcttatctcaaaatgtctaaagcaaattttccacagttatcaatcctattttaatatgtaaaactttctgaaaataaatttcaaagaggggactgtgggaaaccaaaatatgccatccaaagcgtgcctctttggcatattttgagatggctattcagagggtctgcagacacaaagcatggctctgaaaatttatccttttgtaaaataaatttacatgtatatattaataaagcaaacaagggatgcaggcagacggtttctctgaggtccttttatttgaatctaggaaaggttaactcacaggaaangaagacttaagncaggtttgacacttttaaaggt

SEQ ID NO: 49 - DNA, 695 bp, Homo sapiens
ttcggcacgagagaaaagtaaaaaaaagaaagaaagaaagaaacaaacaaacaaaacaactggcatacatatatctcctaaatacaggaagaagtattcataatctcactctttagcatggtacaaagctaaccacaactaaattattgtatataaagccacgtgaagtggtgtgtgacagccttattttgtgaatagggctgagaaaaccagttcaaattctcctgagactatttcagaggagttaaatttgaactcgtttaaaaatcatgatttatttacttaatattaagtttagattaacggacagaaaaagaggagcctggggcatcaccaaaatatagcaatttttaaaacagtatacaaataaacatgttgtatagtcacttaagatcagagggcccaagagagacccttgatggtgacttctattgggaggactatgaccaaatataacagcttgcttgacacaaaatcacctacagttagaattttgctccattacttgggtgkctctctttacaaatcacttaaaatttaacaaaccaaaggagactgtagaaccatgacataaaggaacataggttcagcagaataaagcaacagccttctcatgcatcccataggtatctttcatcaagactactgaaaaaaggtttcatggggtactctcttttttcaatacgcagactctt

SEQ ID NO: 50 - DNA, 590 bp, Homo sapiens
  misc_feature (556): n equals a,t,g, or c
  misc_feature (583): n equals a,t,g, or c
  misc_feature (584): n equals a,t,g, or c
  misc_feature (586): n equals a,t,g, or c
aattcggcacgagtttgcatccaaattgtttgacctttgtgcagtggctcccattatcaactggggaaccagtacaatctttacctagttactactgaggttgttctctctccatcacaaaatttcatgctatttatctgtgagaaaatgcctgaggactttcacacagtaattcatcttatctggaacccttaggatcagatgtagaccgagcaaatgtcaagttcacagagaacacctgtgtcttcagaacattaaagggcaccattagagcttgtttcccttcacttwacatgcacatttttggcataagttggggctgaatgatgttgtcatagcaaatactgctagaatgattgctgtactcattacactaccaaaaaaaagagagagatgaatgggtgtggagtgtcactaaccctyctcatgatcagcacatggagaggacaggacagggtgacattctgaggaactggtaacccccagacagctaatatgctttatgacagattgggtgggttggctatctccaaacttctaagacctagaaattcanaatgagggcataggaatcaaataatcnngnacgg

SEQ ID NO: 51 - DNA, 324 bp, Homo sapiens
  misc_feature (318): n equals a,t,g, or c
aattcggcacgaggaacctcccagggaagatgaggagaggcagagaataacattaattctaaccaaaacccgtatatgttggaggaatgaacagatcccttttatagaacttgaaaatgagcctccaggaggttaaataagctgcttacagtttcacagctagaaacaggagaggcagaattcaaaagcacatctttctcattccaaagctcatgctctctgaggcatactccatggcgggtggtgcactgtgagcaggaagggagtgcccttttccatctatctccctttttcttttatctcttctcaagagggtgntagggg

SEQ ID NO: 52 - DNA, 369 bp, Homo sapiens
  misc_feature (354): n equals a,t,g, or c
  misc_feature (355): n equals a,t,g, or c
agggacactaaagtgagctttaatatttaatctaaaaaagataggaatgtgtatttctttatattagatgcaatcaaaagtttaaagaacctgaagcaaatgtgtagtaggcttataactggactacgtaccttaactactacttaggaaaactaaagcctaatttaattaagtaagctactaaggatctgtttaaaaaattcaaaatttaaatccaaacccaggtctgactaatttaaaagtttgcattcttaagcgtgacacactctccttctgtgtgaggagagttgaaagtatagrtatttgtagrtatagggtattttatggacmgggactttgraggggccataattnnggggttaagggaaa

SEQ ID NO: 53 - DNA, 207 bp, Homo sapiens
  misc_feature (184): n equals a,t,g, or c
agaaaagatctaccctagcctgatgctgctggggctggcaaagttatgtgaagctcagaagttgagaccaagcctccatctcctctactttaagtggaaagttaacacagtctgggaagagtcagccaggagtatcagcccgtttgtkttaattggcttttattttttcttgctgaaaacaggngtgaattacactcttcactgaat

SEQ ID NO: 54 - DNA, 281 bp, Homo sapiens
  misc_feature (84): n equals a,t,g, or c
  misc_feature (265): n equals a,t,g, or c
tcaatgattccaaaaaatcgatacagtttcaaattttaatttagatgtaattgtgatcatcactgtatttatatatccaagtgnctacattttaagttgtagacaattgttatttagaggtatgaagaaaaagagggagctggtgggaagtttgctagcataggagaaagtaaaaagaagcttcaattttatgaatgaatgraattaaaagtcttaaaaaatcttagaggttatttagtatagtactttatttttttccttaagnaacaatcaaggcatgt

SEQ ID NO: 55 - DNA, 373 bp, Homo sapiens
  misc_feature (310): n equals a,t,g, or c
  misc_feature (314): n equals a,t,g, or c
  misc_feature (369): n equals a,t,g, or c
aattcggcagaggttggatggtggtgttctgggtctcattcctggaggcccagcttacagcttgctcttgcaaccctttcgataaatttataagcactcagattctctgaataaggtctcttttaaattaaataatgagagtattttatggctcctgtgaactgacccttacctgatacacttccagtcacagtcagaatcaatctaaagtccttaccaagcccttaccagcccgggaaccatccagccttagccactttcttactgtctctttcactgactctgcttaagttacatgtcacttttgcantttngttcttccctgaacacaataagttgccttaacttaggggtctggggaccgctgtnctta

SEQ ID NO: 56 - DNA, 324 bp, Homo sapiens
  misc_feature (193): n equals a,t,g, or c
  misc_feature (318): n equals a,t,g, or c
aattcggcagaggcagaaaactaaacatttgataattatggcaggaaatatggaaggawttaaaaagcatgagggagaagaaatggaatgcacattacaaaagaaatagctccctggtgggtggtttatgctccctgtttgmattttttccttcatattacagtttaaccacacccttagcatcgcagcttgnactctgcccaaaaaagtcataaatgcatacaaggtcttcacaatttttaaaaaatacgcattgtactgaattctcatttaattcactactacgttgttgattgaggtggaaactccaatcactgntttttt

SEQ ID NO: 57 - DNA, 359 bp, Homo sapiens
  misc_feature (342): n equals a,t,g, or c
  misc_feature (352): n equals a,t,g, or c
  misc_feature (358): n equals a,t,g, or c
aattcggcagagcagaacattggtatgcggcacatgactgtagatcttctcattaataataggcaacctggtcaggtgcacgaagtctagggttcagaatccaacaggctcaaattcaagtccagctcagccacgtggctgagtgctgtctgaacctcagcgtcctcagctgttaaacagaggtaaccatccccatctcagcagctttgggaggaaattaaatgagatatattgggatccagataaccaataaaatatcaaatcactttaccagttcaagctcttaccactcagtgattgcatggrcttatcactgacgratgaactcaggrrttcagragntygagaccancctggnc

SEQ ID NO: 58 - DNA, 371 bp, Homo sapiens
  misc_feature (312): n equals a,t,g, or c
gaattcggcacgagtcacagcaggaggtgaggagtgggtgagtgagcaaagcttcatctgtatttacagccgctccccattgctcgcattaccccgagttccgcctcctgtcagattagcagcagcattcgattttcataggaacacgaaccctattgtgaactctgcatgcaagggrtctaggctgtgcactccttatgagaatctaatgcccgatgatctgcggtggagctgaggcggtgatgctggcactggagcacggctgcaaatacagataagcattagcagagaggttttactgcacagagaccntagtaagtcmakttgtttgcagacttcatatcaaaaccatatctgtgagtggcgggttg

SEQ ID NO: 59 - DNA, 379 bp, Homo sapiens
  misc_feature (155): n equals a,t,g, or c
  misc_feature (156): n equals a,t,g, or c
  misc_feature (339): n equals a,t,g, or c
caaattctggtgataaatattataatttagtctgaccttggcctgaggtttataaagaaatactgttaaacattgctttctgttcaggtaaatatatacacagaaatagaatagtatactctcctgcaaaagaatgttatttactttcattttgnnggatgttgtcttaagcctgtttttctgaactccacttaatgacccacactgatgctctggtttgacaaacaaaatcttcagatttgatgattttgttaatttctagagcaggctcaggtgaaaatatcagccagtgattctgaggtgttgcattcctatttttaaagcagtcattaggtaggnctgttgtaggcaatggaaaacacattttttccttattaag

SEQ ID NO: 60 - DNA, 371 bp, Homo sapiens
  misc_feature (343): n equals a,t,g, or c
  misc_feature (345): n equals a,t,g, or c
gaattcggcacgagtatatgaacatcacacacataaaccatatatgcagacaggcagaagaagatccmstaattgtaagatttttacttgccaatctcttaattgaattattggcctcatggtgaagcctttcaagaaataggactaggaaaacattcagtttttagggtttaataatcaggtatagctgggargacaaaaacagatttttagagggrtctatccacttttaattcttggggttccatgaggaaaacagatatttttttccmaaattgggkatgtggtgccttctttgtttctcccaaggagtycccargctatcagaagtttaccttagggncntctcgtgtggtgccattaaaagtgga

SEQ ID NO: 61 - DNA, 694 bp, Homo sapiens
ttcggcacgaggcattttgtatttctgctgcacgcccagtaaaggagaataatgtgtgttgcccaaggggagatggccatattgttttctccttgccccatttgtgtatccggtggtacataaaaaaagaaggacccagagattttactgcttcctttggagccaactcctaactcttctttagagaggaacagggggactccactcattcccatcccctctttcacaaaccaacaggaacttcatgcagtaatgactggcaggaaggaactaaaagcctgtccgatgatcctttccctggtgtggttgcttgaatccaactttagtcttggtcctgagagaatgattcatatatgattaatgggccaggcatggtgcctcatgcctgtaatcccagcactttgggaggccaaggcgggcggatcacctgaagtcaggagttcaagaccagcctggtcaacatggcaaaaccccatttctactaaaaaatatgaaaagtagccaggtgtggtggtgcatgcctgtaatcccagctacttgggagactgaggcagaagaatcgcttgtacttgggaggtggaggttccggtgagcggagatcgtgccactgtactccagcctgggtgatagagagagactccgtcttaaaaaaaaaaaaaaaaaaaaaaaaaaaaaaaaaaaaaaaaaactcgag

SEQ ID NO: 62 - DNA, 342 bp, Homo sapiens
  misc_feature (67): n equals a,t,g, or c
aattcggcacgagtatgaatgtaaaatgtggaaagctatttatgctttcctttaacccttattttantttttcctgttgtgtttgggttaaatgtaaattgtattcatttgttgattttaatatgtgtgacccacacagaaataattttatttattgaacctcctgtgggaagatgcttaatagtttataaatataaaattgtccccaacacttaacagatgatgctaaaagatttatagtttatccatggatgttcagttttgttttttccattaagttatcatggttcaaattatccattaccaaaaacgtcatgaggaaagatgcatgaggtccaacaa

SEQ ID NO: 63 - DNA, 400 bp, Homo sapiens
  misc_feature (359): n equals a,t,g, or c
  misc_feature (366): n equals a,t,g, or c
  misc_feature (398): n equals a,t,g, or c
aattcggcacgagaagaaagaaagaatgaaagaaagaaaagaaaagaaagaaaggaaagaaaaaggaaagaaagaaaggaaagaaaggaaagaaagaaagagagagaaagaaagaaggaaaaggaggaagggaattccaggtatataccactgcatgagtaaaggcagggttgtggatagacatagttgatttgtagggcccttgtttgccaagaatagtcctgctttacccctgttgtcctgatgtaattattaataatactgcctcattcagtcttaaataagtcttggrtttggactagaaattatatggctaccyctttatgtgggactaaaagtaattccttgrgacmgggacntggagtnaggtgcccaaggaaagctagaaggtagttttntc

SEQ ID NO: 64 - DNA, 309 bp, Homo sapiens
  misc_feature (165): n equals a,t,g, or c
  misc_feature (166): n equals a,t,g, or c
aattcggcacgaggaacatatactcagtgaaatcacattatgagacaagagcggaagactttgttcttcatttcacattttctaaatgagctactttgcaaactgatcactagaaccatatacattaacaggatttcttgacaggaatttattcaaattctagtnngaagcaaaagggaggtatcgtgcacatttaactggttgtctactgttgagttcaaacataaccatggtcaaattattcagatgttagaaattcagcaagcttcttggtacctaagrttaaggaatcaagcatcagcagaaatt

SEQ ID NO: 65 - DNA, 396 bp, Homo sapiens
  misc_feature (178): n equals a,t,g, or c
  misc_feature (345): n equals a,t,g, or c
  misc_feature (370): n equals a,t,g, or c
ggcacgaggggattagaacccagatccccagcccaagttcaaacttgtcccctctccaggttacaactccaaaaaatggggctgtgacccagaaaactctgtgccagcaatctctgtctgtccccttcttcactctcacctagtttccacggggctcaggtgtctcctgttgggccancaggctggcctggcactcagccacctaggaccccatgtatcctggcattctaggcctggggtgatgcagacagatttcctcagcctccgcttcttctgccttgaaaaaatcagtccttcctgtgatccccggggacctggcttggggctgcgtgtgtgcgtgcctgngtgtgtactcaaaattgggcctggnaaggaagccggaaggttaagaaatgc

SEQ ID NO: 66 - DNA, 427 bp, Homo sapiens
  misc_feature (298): n equals a,t,g, or c
  misc_feature (376): n equals a,t,g, or c
  misc_feature (392): n equals a,t,g, or c
  misc_feature (394): n equals a,t,g, or c
ctcgtgccgcgaaggccttcgccatagcgtgagtgggccttacccagtcgaaggcctttgccacagcgtgggtgggccttacccaatcagtcgaaagctttttgccacagcgtgggtgggccttacgcaatcagttgaaggctttttgccacagcgtgggtgggccttacccagtcaaaggcctttgccacagcgtgggtgggccttacccaatcagtcaaargcctttgacacagcgtgggtggggccttgcccaatcagtcgaagtccttcgacacagcgtgggttgggccttaanccaatcagtcgaaaggccaccaaagagcagaaaatctaaaaactcttaaaggaagagaaggattttgacccagaatgnagactcaagctgcagnancaagtcctgctggggaatttccagcctgctgga

SEQ ID NO: 67 - DNA, 438 bp, Homo sapiens
  misc_feature (295): n equals a,t,g, or c
  misc_feature (435): n equals a,t,g, or c
tttaaaactagtctaggaaacactttaatttctgtgagcaaaactgtatcttatctctgccttagttaaagatacaaattgtactttttaatatttatttgttaaattctctattaccaaggtgtatcggagatctacatgaatctctcaataaataattggtacattttatttatatgcataaaaattaggagtctcctccatccccagcatcatattccatacccacaaaacaatggtgaataagtcataatccccatttaacaattttctctatgtattgattcctgctatntgcatgatactgaggggagcacttcatagaagacaataaggcttttgagcaccttctgtcttctggggccagttgtaattccatttcaccattatcccataataacctggcaagaaggtggtattaattatataaggtgnggt

SEQ ID NO: 68 - DNA, 61 bp, Homo sapiens
ccagtacccacttccccctctttctcccttccccttctccccactctcttttttttttttt

SEQ ID NO: 69 - DNA, 225 bp, Homo sapiens
  misc_feature (187): n equals a,t,g, or c
  misc_feature (212): n equals a,t,g, or c
tctcagcctatttagaagtatcccatagtttaaaaatccaggaatctctgaattcctggctaactcctgagtaaaatcaacctatctaccaggaaaagcactagaaggcaccgtgccccttcatgggcgartgacttgagggaatacgtgggtaaaagggaaggtgccataagttaacttctttggncagcactccagactgagcatcgagnctccttattccca

SEQ ID NO: 70 - DNA, 314 bp, Homo sapiens
  misc_feature (294): n equals a,t,g, or c
  misc_feature (301): n equals a,t,g, or c
  misc_feature (311): n equals a,t,g, or c
ttttcttcctttcctttttacaaaaatatcctcatttcttctcttgtctttttgtctttttttctccacaattctacaaactttcttcttttccattttcctcttttactgtcttcttatttcttcttcattttttattccttcacttctttgtctgccccttattttcttcttcaatatcataggttttgcacaaattttttcaacatctattcacctattcttttatattgctagtgtaaaatttttaatatgtctgaagcaaatttcactgtgcataattaatcaataatntactcancatttcattnaat

SEQ ID NO: 71 - DNA, 425 bp, Homo sapiens
  misc_feature (390): n equals a,t,g, or c
  misc_feature (420): n equals a,t,g, or c
  misc_feature (424): n equals a,t,g, or c
ggaacgggagatgttgcaggcgccgagagggcgggccagggccgcactccggagactcgcggttgctacgcgcaccatggctggaggctccctggcattgggcagtgttacagtgcactcttctgaacctgaagtcagaattcctgagaataatcctgtgaagttgtcctgtgcctactcgggcttttcttctccccgtgtggagtggaagtttgaccaaggagacaccaccagactcgtttgctataataacaagatcacagcttcctatgaggaccgggtgaccttcttgccaactggtatcaccttcaagtccgtgacacgggaagacactgggacatacacttgtatggtctctgaggaaggcggcaacagctatggggagtccangtcaagctcatcgtgcttgtgcctccatcnaggnt

SEQ ID NO: 72 - DNA, 440 bp, Homo sapiens
  misc_feature (259): n equals a,t,g, or c
gttgaccagcgcaaataacccgatgaaaaatttgaagtaaacgggaaaatcaaaaaaggtctgaatcacggttagctccgaagcaaaagccggataatgttagccataaataaggttgaaaagacgcgctgacaatacgccttttgacagcatttttcacctcctaactacttaaaattgctatcattcgttattgttatctagttgtgcaaaacatgctaatgtagccaccaaatcatactacaatttattaactgtnagctataatggcgaaaagcgatgctgaaaggtgtcagctttgcaaaaatttgatttggatcacgtaatcagtacccagaagtgagtaatcttgcttacgccacctggaagtgacgcattagagataataactctaatgtgtaaaccttttagtaaatcacagtgagtgtgagcgcgagggg

SEQ ID NO: 73 - DNA, 435 bp, Homo sapiens
  misc_feature (369): n equals a,t,g, or c
  misc_feature (389): n equals a,t,g, or c
ctgcaatgtccctggaattctgaaggctgggagcagagggagcaaaaagtgatgcctggagagtttagtttgaagaacagagcatcagaktgggggaatgagaactgtctgcaatcacggctgagttgatgacctgggattagaatcctgggatttctcctctctgggctcagtgtccctawtaggttgtgcaaaagtaattgtggttttggcattaaaagcaataacaaaaactgcaattacttctgcaccaacataatagatgaagagcagtgtggatttgatgatctgtcttaaaaggcctacctagcttattccagccaggctgtatagactccagccatcccctatccagacctgctggtggtnggggttggaaggttgggatngggaatcggtcccactgcacctgctaactttatgggcatgttgcat

SEQ ID NO: 74 - DNA, 205 bp, Homo sapiens
  misc_feature (197): n equals a,t,g, or c
ggcacagctgccactcacccactgctgtgcacttggttcctaacaggccatggactggtacaaggaataatgcagggttggggacccacaaggttacatagagtattggttaaaaaaaagtttgccctggccgggcgcggtggctcacgcctgtaatcccagcacttcgggaggccaaggtgggtggatcacctgangtacggga

SEQ ID NO: 75 - DNA, 328 bp, Homo sapiens
  misc_feature (305): n equals a,t,g, or c
  misc_feature (308): n equals a,t,g, or c
  misc_feature (322): n equals a,t,g, or c
ggcacagtcacagtccagaccatgcctgtatatggatggatgagggagcaaaagttcccaggggctcaagagctgccaaggccactctgcctccagctaaaggggctgcaccgcaatgctcatcttccarggaaagggccagatcatggggaagccacctgtgtgtgggagagcagaatccatcccatgcctctggattttgttcatgggacacaaaggtaaagatgggcaggtgggaagaggatgttctcattccaggacatgtgttttgagaccactttctctgctgctgtgccccaggatcnttnctggggccttgggnggttgc

SEQ ID NO: 76 - DNA, 415 bp, Homo sapiens
  misc_feature (369): n equals a,t,g, or c
  misc_feature (370): n equals a,t,g, or c
  misc_feature (383): n equals a,t,g, or c
  misc_feature (410): n equals a,t,g, or c
ggcacgagtagatgtttcagaatttagaatttttgggactttaaaaaggtaatatgatgcgcatgcctttttatgtaacactcccagaggaatgtggaaacaagtgggataaaaagcctgtctccgtacaggttagaaattcccaccaggtgaatttcagcaccatgcttaagaaaaaatcagtttggatatagttttttggaatccagaattatcgttaaggaattgaggacacttggagtcttgcgggttgttgtgaagatgaactggatgtgtgtatgtacgtgtggatctatgcaatccacaagatgtaaagcttgctatttatgttagctgctgcagctgctgcccttgctgtgatgatcattnngggttatgattgnaattttgccccttctcaaggctcaacncaaac

SEQ ID NO: 77 - DNA, 352 bp, Homo sapiens
  misc_feature (343): n equals a,t,g, or c
ggcacgaggaaaagcagagaggcagcagcagctctgggagaaagggacagcagacattagaggggcgagtgttctgggagcctcagagcagtgatggattttccatctttccttggaggaggggctgggtcttggaatcccctcccttctctgccccttacacacagtttgtcctgaggagcagacatgaggtctgtgctcacccaagcgctcacagtctccttctctcttcaatacccatctgctgggcctaattcttacctcaaaaaggtaactcttgattattcttaaaagtttaaaaaaaaatagtaactgtgattctggtctaagctaaaattatttntcctcaagg

SEQ ID NO: 78 - DNA, 343 bp, Homo sapiens
  misc_feature (285): n equals a,t,g, or c
  misc_feature (296): n equals a,t,g, or c
  misc_feature (318): n equals a,t,g, or c
ggcacagaaaaaatctaaaaataagacaaacgagaagtagaccctggaattttgttccagtgttcatcaagctcacataactttattttatacaccataaaaacaagaaaggcctagaaagataccccgctgacctccagacacaaggcatttattgcattctcatgactgtcatctaaacattaacaaatcaaaagaagattcttattaaggtatacatttttagtggaaccccagacattgtctatagttcaacaattccatttattaaatgctcacaagctnaacttctaatnaatttttgtactcttgccggcnatcaacagtggagatgaacacccgt

SEQ ID NO: 79 - DNA, 290 bp, Homo sapiens
  misc_feature (268): n equals a,t,g, or c
ggcacgagctggagtatggtggataggtgtgtgtgtggagggggtttaggggccagactgtgccatgtgggccagtagggcaggagatgcctgggattttattctaaaggtggcgggcaccctttagagggtctcagtagcaggtttggaggcagagacgggtgaaggagggagatggcagtggggctggagctgggagagtccacgtggcatggggaggtgggggagggaagagcccagataaggatgcctggggatgcatgcaggnagaagggatgcctgaaagcagc

SEQ ID NO: 80 - DNA, 251 bp, Homo sapiens
  misc_feature (184): n equals a,t,g, or c
  misc_feature (186): n equals a,t,g, or c
ggcacagaaaagtaaatttattttttttcacatcccacattacatttcttgattagcacagtcaagggtgacagagaactactctcttaaggattacctggggtctgagtcatttcagaagattacacagrattttccacagttcctgaaggtgaaagcttttcaaggcaaaataaaatctggncnatagcctttgggatgaagtcaggccgacatatcacagctttgagctaaacagtgtattggagggc

SEQ ID NO: 81 - DNA, 335 bp, Homo sapiens
  misc_feature (145): n equals a,t,g, or c
tcggcctgtaasactgcctttaaaaaaattaaaaagagaatttataacaaataggtgaaatacgtgatcactgagttactgaggtggatattgtattaaatatggcatggttcctggagatttggggaagttctggaggcttttntttccaatataaataaaactttcaaaaaaactgaaagacaatgttgtttattgtgcaagaacagtcaagactacttaaatgggatattgtgacgaagtgctgccaattaatgctgtatctaatctcaaatacatgcaagacttttatccttcttagtaggctgaccaaaaagactaaaagaagttgtctt

SEQ ID NO: 82 - DNA, 431 bp, Homo sapiens
  misc_feature (344): n equals a,t,g, or c
  misc_feature (412): n equals a,t,g, or c
  misc_feature (418): n equals a,t,g, or c
  misc_feature (419): n equals a,t,g, or c
attgaaatttccccaaacctaagaggtttcatctgtacatagaaatattttcaccatggaatgtatagtggttgaacttttgaagaaaagttgacttattgtctaaaagttttccatttgccctcttctaggtttgcactcaagactgacatttaccgtaatggaagctgttcatatgcccccaggaaagaatgaacaatttaatagaaaatgctaaaggagtgatattaggtgagcatctcatgtcatccgaagaaaaacataggcagattttctactctttaccttatttcccactttattttcaggatgtggggataaaaatgtagggtctgatgaatttntcaacagcttataattatcagtgttattgttagaataccagaatataactaataaccaaatgtaaaangttggnnaaggaaattgca

SEQ ID NO: 83 - DNA, 83 bp, Homo sapiens
ctgcccacctccagccagcccatagctctcactcttggcccccttagtatgttctcaaagcaggaaaagcaacaactgatttt

SEQ ID NO: 84 - DNA, 263 bp, Homo sapiens
  misc_feature (4): n equals a,t,g, or c
  misc_feature (16): n equals a,t,g, or c
  misc_feature (254): n equals a,t,g, or c
  misc_feature (257): n equals a,t,g, or c
agcnaccgtgcctggntgtgcactcatgtttgatttttgcagaaccacccttccctaatggttttctcctagatccaaggtgactttattcattttagaatgaacttatcccattgatactgaaactagagttggcatacatcacgattggcagaacttggtcatgtttagcgagatggaagtgttctgggaaactcctccttcttgtagacgtggaggtgagggtgcgcattcttcagtgcctggtaaaaggnttncgcttg

SEQ ID NO: 85 - DNA, 365 bp, Homo sapiens
cttaactgtcttctacaatgctgcctgaaatattaggtttctcaatccaattgtcacatggcatcaaaattacaccattaccactaggcatttctcagcagagagttttctaggcaacaatgcttcttttcttcctctttctcttcataaacagaaaaacatggaatccatattttcccagaagataaacatgtgattcacttacaacgggactgtctgtaaaataactctggctcagggtgtggacatcatctcacccattgtcatcacaatattctttaagtaaccactttctgggatagaactgccccaacaaggtagcagccaggtcacatggtggttttagtttactctctcmaacatgc

SEQ ID NO: 86 - DNA, 300 bp, Homo sapiens
aattattagatccttgtctcatctttcttaactttaatttgttttttctgcacaaattgtctaatgtcttatttaatttcacatttaggagatataggtaattattatttacatacatgtagataatctgctattgctaggaggaaatctttttttagaaattttacttttaatatataaaaattgaaggttgaaaatgcaaagccaaaaagcacaatacataacaaaaagtaaatcaattgggctttctaaaagttaaaacattttctctgcaaacaacacggttacgagaatgaaaag

SEQ ID NO: 87 - DNA, 371 bp, Homo sapiens
  misc_feature (252): n equals a,t,g, or c
  misc_feature (276): n equals a,t,g, or c
  misc_feature (351): n equals a,t,g, or c
ggtagccagaggcaactccaattcctgctaaacagtaggaagggttcttactagagacggctcttctgcctcctggggtggaggggtgccgtcaggcatggaggaaggactagcctcattgtcagtggtcacgtctccatctgtcagcgcatcaaatgagggcaatccgtcttcatccacagggagactgtctagtgtctctgtgaggactgctagcaagtttgcctcattctcttcatctatcttctgcanaaagagaaaaaaacagaagatgtnagttgaccctgggaggcaggtaacactatgcatcaacatgtttgaccaaatgagtgaaccatacgtgaaatctanaatgcccattccagaacaca

SEQ ID NO: 88 - DNA, 435 bp, Homo sapiens
  misc_feature (364): n equals a,t,g, or c
  misc_feature (376): n equals a,t,g, or c
gtttcttcctaaatattttctatctgtaggtggctaaatctgtggctgtggaacccatatatatgaaaggctgactgtatattcttcaattagattactttcaaagtcataggttagtggaaatcctttaggaaaaatattatttttagcacctatagaagatcaggtgttccaagtgatatatatggttttaaaatttttaatacatgaattactaaacatttttaaatttaatactgcattttaaatttatcttgtatggcttataaccaccgcagaagatagaaaatgttattttgattttactgatggggactagaggtacagagacgttaaataacttgctcagttacatacttagtcnataaaaaagtcnaaatttgagcctaggtaatctgaccccaatttacagtccctggagtataaaggaaaaaa

SEQ ID NO: 89 - DNA, 347 bp, Homo sapiens
  misc_feature (308): n equals a,t,g, or c
  misc_feature (310): n equals a,t,g, or c
  misc_feature (319): n equals a,t,g, or c
tccacgggcatctgtatatgtcaattccccaattcaratgctggtagaaacatcccatgtgcaactgacacagwatatcatacaaacacctcaagagttcaaagacttttgtcaatatgcttgtaatatatccttcagaacaagaaggaaaccagttgaaggtaaaccgactgtagcaaaccaatttcaatgccccacccaatgctccttggactccctttacatgcacactgtggcttcagtcttcgtttggctccaaagccagaacgtgggcttcttctggccctaagtattgaagcccatgttananttccacccngggtggaaatgctaggacaattttacca

SEQ ID NO: 90 - DNA, 334 bp, Homo sapiens
  misc_feature (333): n equals a,t,g, or c
  misc_feature (334): n equals a,t,g, or c
ctttttctaagtgtgccttttccctcatttctctcattggcacatagttggtgttaaatcaatatctgataaataataaattaatgcatacatggtgaaaattttctaaattttaaagttctctgcccatggagtagaagaacatagcatctgacattttggcaatatatggacacataaatgaatcaatcataaagaaataataacttctgaaaatccagcccatataaacagttatttctagatccaccgagcttctgcgtgctgggccaggaagatgcctttgatggctaggggatatgtaggttctgggtatgttccagctgtcactcnn

SEQ ID NO: 91 - DNA, 351 bp, Homo sapiens
tgcagagaatagtggagatgcagaaagacagtctctgtgtggtgagtaaatacaggtttagcatcttagatctgaaaatctgaaatccaaaatgctcccaaatctgaagttttttgagcactgatgtaacacttaaagaatatgctcatacaacctgtaatgcttcaaagaagcatccaggattcatcattctcagtgagaatctaaatcagtggagctagaaagaacaagaatttaaattattactttagagtcatgtaaggagataaatttacaaggagtatttctatgcatgttcttcattttcgtaatttggatcagggtaaaaaaattagagaaagaattgctaaa

SEQ ID NO: 92 - DNA, 232 bp, Homo sapiens
gaccatttcacatgccaacatgataaagctgttcattattcccaggtttggtcatcctggttgcttaatctagcaatgttgacttaaaatgactagacagcccacagtgattgcccccggctcagggtcacactgggccctgtaacttctcattttacatcatccaagggataagactccagtacaactgtagtagatgtttgtaatgaaaatgagccctttgctgagatgt

SEQ ID NO: 93 - DNA, 185 bp, Homo sapiens
  misc_feature (145): n equals a,t,g, or c
ggtgagacttcacctcaaaaaaaaaaaaaaaaaaaaaaaaagcaggggaaactagacttattttgtggcccaaactgaaaagtctgtaaacataaaaatactcattgtatttgttttcaaatttctgcttctggccaagatgtantagtagagatcttatttacctttcctcctgaaatgacaaa

SEQ ID NO: 94 - DNA, 292 bp, Homo sapiens
  misc_feature (291): n equals a,t,g, or c
gagtgagccaagatcgcgccactgcactccagcctgggtgacagagcgagactccatctcaaaaaacaaaataaataaaataaaaaataaaacaattttgatcttacagatcccctaaatatcccctggggacccccagagaccctggtctaccctgtccagtagaatcgggttattgctawtcggttaacctgtgtgatcaggaaaatgttacatgggtgacatttgcacaagtwctgtgttgacctttgarctgggtttggaaccagttaatgaagagggatcttggang

SEQ ID NO: 95 - DNA, 1040 bp, Homo sapiens
  misc_feature (985): n equals a,t,g, or c
  misc_feature (1039): n equals a,t,g, or c
atcagatcccggcggctgcggcgcgcgcgagccgagtgtgagcggaaaggggcccggcgtctgcctcgagactgaagaccgataaactcaagccatggagggattactgcattacatcaaccctgcacacgccatttctctcctaagtgccctgaatgaggagcgtctcaaaggacagctgtgtgatgtgctgctgattgttggagaccaaaagttccgagctcataaaaacgtcttggctgccagcagcgaatacttccagagtttattcacaaataaggaaaatgagtcacaaactgtatttcagcttgacttctgtgagccagatgcttttgataatgttttaaactacatttattcttcctctctatttgttgagaagagcagccttgctgctgtgcaagaacttggctatagtcttgggatttcctttctgactaacatcgtttctaaaacacctcaagccccctttccaacgttgtcctaatagaaaaaaagtgtttgtagaagatgatgaaaacagttctcaaaagagaagtgtcattgtttgtcaaagtagaaacgaagcacaaggaaaaactgttagtcaaaatcaacccgatgtaagccatacttcccggccctctcctagcattgcagtcaaggccaataccaataagccacatgtcccaaaaccaatagaaccacttcataatttgtcattaactgaaaagagttggccgaaagatagttctgtggtatatgcaaagtctcttgagcattctggatctttggatgatcctaatagaatcagtttggtgaaaagaaatgcagtgttgccttcaaagcctctgcaagacagagaagctatggatgataaaccaggtgtgagtggtcagcttccaaaaggaaaagctctagagctggctttgaagagaccacggycacctgttttgtctgtttgtagctcatcagagactccctatctattaaaagaaactaacanaggaaatggtcaaggtgaakatagaaacttgktgactattcaaagttaggcttna

SEQ ID NO: 96 - DNA, 571 bp, Homo sapiens
  misc_feature (465): n equals a,t,g, or c
  misc_feature (493): n equals a,t,g, or c
  misc_feature (521): n equals a,t,g, or c
  misc_feature (556): n equals a,t,g, or c
  misc_feature (571): n equals a,t,g, or c
gggaaaacctttatgtagatcataactatcagaaagtaatgaactaattacttaaatatatagatctgaatacattcattgcacatgttaagattgggaattccatgggatttatgatttgtacatggttcagattcaggacttgttaggatttgctttggaaatctctttatgttgcccaaattgatgctgaaatgctagagaacttctgaggccttgagagtcccccacccagactatcagttcatacattctctttttcagcagtctcaatttacatgcactaattggtagctaatgtgctcccaaaggcaaataaaggtatttgttgctttaaaatcctaagtctttttctttttccaacatgtgcttggaaagagaataaaactttgcatatgtttgtctgggactcctggatctgattaagaccctggtaatattactctgtattcacacagttcttanggtcctcattgcttggctgggtgttgancgcatgactattgcagcatgcacttcanccagtggtgactttctgcttacgcagtcaatctantaaatactaattcan

SEQ ID NO: 97 - DNA, 251 bp, Homo sapiens
ggccaaaggcaaatgaggtaattaaatatggggctcatttattttagcattttatgtattttcttaggttttttttaattaaaaatatttttccagttgcaagatttacatawagggaaacaaaataatttaaatgtgtcaactctaatcacagatcttttcaagttaattaattttatgttataagaagctgttgctatagtttggtgtaagtcatcttacctttgctgtaacatgattgaaaatataat

SEQ ID NO: 98 - DNA, 232 bp, Homo sapiens
gtgtggactctaggggttcaaggatcccaggcctgctctagaatgtgaagaaatgggctttaagctgttggctgaagttcttcgagatgaattttctgaagcagtgctgtcaaagagaattttcttgaggtgatggaatgttctacatttatgctaatatggtaatcactaataacatgttactaagcataagaaatgtagctggtgtacctaagaaactgaaaatttaatt

SEQ ID NO: 99 - DNA, 548 bp, Homo sapiens
  misc_feature (368): n equals a,t,g, or c
  misc_feature (394): n equals a,t,g, or c
  misc_feature (397): n equals a,t,g, or c
  misc_feature (514): n equals a,t,g, or c
  misc_feature (538): n equals a,t,g, or c
gaatactgagttttgagtggatgatgtaagtgtttatagttcaggagatgaattgaattgtgttcccctaaaattcatatgtcgaatctctaatccccagtacttcatatgtgactatatttgagcttaaggccttgaaacagtgattaagttaaaatgaagtctttagggtgggccttaatgtaatctgaatggtgttcttataagaagaagaaatctgggcacacctaaaggcaktggacttaakcatggagaaataagggaccatgtcaggacacaatgaggggacagctatcacaagccaaagagacaggccctgggagagcccaaccctggcaacacgttgattttagacttccagcctccanatctttttgagaaaataaatttctgntgnttaagccactcattatacagtattttgttatggcagcccaagctgactaatttattgatttatttattcaacgaatattcaccacaattcttcactttactccagatacattcctantgccttaacatgcaccggttggantaaagtggaa

SEQ ID NO: 100 - DNA, 643 bp, Homo sapiens
  misc_feature (583): n equals a,t,g, or c
  misc_feature (618): n equals a,t,g, or c
  misc_feature (635): n equals a,t,g, or c
  misc_feature (638): n equals a,t,g, or c
  misc_feature (643): n equals a,t,g, or c
ggtgaaactgctaaaaaaagaattcttaaaaaaatttcaaaacttatttacccccaaacatagcaagtaatgacaatatatatttatcactttctaagagttaggaatctgacaatgacttagatgggtgattctggctcaggatcccttatgaggctgcattcaagctgctggctggggctgcagtcttctgagggcttgtctggggtaggaggacccatgtgtaaggtggctgtgaagaagaagccccagttttttgccacatgagcctctcactaggttacttatgacatggcagctagttttccccagaccatgtgctacaagagagaaagagagtaagcaagctggaagctgtcctgtgttttacaatctgattttggaagtggtatttcatcacttctgctgtattctgttggtcagtgtgggaaaggactgtatagaggtatgaataataggaggctatctgtgagccttcctggaaagttggctatcacactttctacaattttaatactttttcttggttgagaattgggaaaaacatcttccatgaattggctttttgggcaccttttgcccncttttttccatgataatatttaaagggtatctaantttgatcattctcttgntancttan

SEQ ID NO: 101 - DNA, 556 bp, Homo sapiens
  misc_feature (33): n equals a,t,g, or c
  misc_feature (467): n equals a,t,g, or c
  misc_feature (488): n equals a,t,g, or c
  misc_feature (503): n equals a,t,g, or c
  misc_feature (541): n equals a,t,g, or c
ctgaagaccacgttaagctcgcaattaaccctnactaaagggaacaaaagctggagctccaccgcggtggcggccgctctagaactagtggatcccccgggctggctgccgccatcggcccgaccatctttgtggatgtggacccgaatgcgtccttaagtcgcgaagagattttcggtccggtgctggtggtcacgcgtttcacatcagaagaacaggcgctacagcttgccaacgacagccagtacggccttggcgcggcggtatggacgcgcgacctctcccgcgcgcaccgcatgagccgacgcctgaaagccggttccgtcttcgtcaataactacaacgacggcgatatgaccgtgccgtttgggcggctataagcagagsggsaacggtcgcgacaaatccctgcatgcccttgaaaaattcactgactgaaaaccatctggataagcctggaggcctgnaatgaccgacataccagcagntactacgccggcagngcgaataaatatgcaccattcgacacgctgaatgaagncaatcacctgggacg

SEQ ID NO: 102 - DNA, 518 bp, Homo sapiens
  misc_feature (414): n equals a,t,g, or c
  misc_feature (443): n equals a,t,g, or c
  misc_feature (480): n equals a,t,g, or c
  misc_feature (487): n equals a,t,g, or c
  misc_feature (497): n equals a,t,g, or c
gggagaagggacatacatttggtaagtgtaaataagagtctttgctgattaattcagtgtggcccatgagaaagagtggaagtgtccaaggttccctcaggtttacagcttgggcaactgactgagaacagaaaggagctgccattgagaggaagaaaagaaaatgacactgagtccatgttgggacacattgggtttaaagggatatcattatgacctaagctctctgaattccagtgactgggaatatgggaagatacatctttaacagttgaagcaatttatacactttaacaattgaagcaatttatacaccagagcctaaggaatatttatagatgagggctgtgctgcaatgacagatagggtttatgaaacatacactaatctgaccattctatcctycagactcanggaaggaaataataaaagtaagtaccatnaaaaatagacttttatgcataaataaataaaaatcancttgganacagttcatnccttgtataagtaaaacaggc

SEQ ID NO: 103 - DNA, 121 bp, Homo sapiens
taaggcaaccccgccagcctagccgggtcctcaacgacaggagcacgatcatgsgcacccgtggccaggacccaacgctgcccgacctatcctgaagccaaaggaaatgagatcggaattc

SEQ ID NO: 104 - DNA, 255 bp, Homo sapiens
  misc_feature (13): n equals a,t,g, or c
aatgctcagttgnaacaaaaatttgaaagatagcaggccataagtgataagaaattgaatggcaatgtgaaaacccttgatctgtttacaaatgatagtttcgaaaaaggaatgtgtctgtcatagggttgacttaggtcaggggttctaaactaggggccacttttcaacctccttccctcagagatatttggcaatatctagagacatttttggttgtcgtaatgggttggggagcagacttaatacattctt

SEQ ID NO: 105 - DNA, 625 bp, Homo sapiens
  misc_feature (5): n equals a,t,g, or c
  misc_feature (10): n equals a,t,g, or c
  misc_feature (121): n equals a,t,g, or c
  misc_feature (203): n equals a,t,g, or c
  misc_feature (360): n equals a,t,g, or c
tccantccangctgcatcacagccgttgcggttttcctgcaaacattttgtaagtggcgtaaaaagctaatcaactttagcgttaaacttcatcgccgttaaccagttgcattgcgtcgcnttccagcttttgatattgccttttcgcctgtttcgggcacagattaaagcaaagcgcagacaatgcttggtgatcatcagcnggattcgcccttctcttcatgtgcttcatacgccgcgtcaatcagctgcacaccatagcgatgataaaattcacgcgctttctggttgtatacgttcgcgaggaaactcagatgcgtttgcggataaaccggcgcaggatcagcaaccggtttacgntgccgcgctggtaactggcaagacgcgcagcatccagcatgtcagcagcttcacggcggaactggtttaacagactgtttggtacaaacagcgccccggcaaattaatttgcacatcgcgggcgtaatagagggtttgccccagttttgccagaccatccttcagattgttcattgctttttcggcgttattggcttcgtcgaactgcccgtccagcgtatgcgtgatgctgacaccctcttcactggtgagggtcagaatcagt

SEQ ID NO: 106 - DNA, 608 bp, Homo sapiens
gagcagttgttgatttagtgacttttctgaactcattctttttttttttttttagagatagggtctgagttggtgactcaagggatcctctggccttagtttaccgagtagctgggactacacgtgtgccaccgcacctagcttatgaatgaattctttaaagtctgcattgtttattgtgtgtgaccactcaggtttctgctcagttagcttagtggtcaactaatgattagagagacaggttttcttaaacaccttcaaccaaaaaatctcccagtctttcctgaggggtttagtacttacgttgggacaagccttyaacaatcagccaagcactttacattaggttggtaccaaagtaatttcgttgaaatgacaaaaccgcaattttttgcaccaaccaaccaaataattctgccttagccttcacttcttgcttctgtagtgcctcaaggtcacccagaggttagagctcagggccttctcaggcctatcttgagtgttcacataaccctagacatatgcacaccctaagcaccttctacagtctcaggaatatgttagcgtttttcaaagccctatggacatcttattccccagctaaatac

SEQ ID NO: 107 - DNA, 529 bp, Homo sapiens
  misc_feature (402): n equals a,t,g, or c
  misc_feature (408): n equals a,t,g, or c
  misc_feature (477): n equals a,t,g, or c
  misc_feature (483): n equals a,t,g, or c
  misc_feature (524): n equals a,t,g, or c
actggagttgagaacctgtattttggaggcttacaaagcttttaataaaactgtgtggctgtgtctagatatccatgttaggttttgagtgaatttctgcatgaagaaaagacatctatttgggtggtgatgttgatggttggggcagtggatcctgtcttttataacaatatgattagtaataataatatgactaatatgattagtaatatgattagtaataatatgactaatatgattagtaatatgattagttataatatgattatattactaatcatattgttaataatactaactatcagttatggaatagttatattaggctctgggctaatctccatattagcactatatataaacactattattattctaaattttataaataaggaaactgangtgtantaacatcaccgtgtaatttcctcacgatcacacagctgcttgactccaaagctcatctattcatcactnctccanaagattaatttccatttaaataaggaaaatgtggattaaanaatga

SEQ ID NO: 108 - DNA, 373 bp, Homo sapiens
  misc_feature (233): n equals a,t,g, or c
  misc_feature (245): n equals a,t,g, or c
  misc_feature (252): n equals a,t,g, or c
gtttttaaatattttcttccatataggaaattaatagttactttaatgcataactgtatgttatacatatgttataatgtataaaaatttattttaagatataccaaatcatgagtagttttattttttaactactagctccacaacatcttacctacatggcttctctttactttttaacattgagtatacctctttttttttttgagacagagtctctctgtgtcgcccangctggggcgcantggcgcnatctcggctgactgcaagctccgcctcccgggttcacgccattctcctgcctcagcctcctgagcagctgggactacaggcgcccgccaccatgcccagctaatttttttgtattttttta

SEQ ID NO: 109 - DNA, 602 bp, Homo sapiens
  misc_feature (9): n equals a,t,g, or c
  misc_feature (52): n equals a,t,g, or c
  misc_feature (581): n equals a,t,g, or c
  misc_feature (582): n equals a,t,g, or c
  misc_feature (597): n equals a,t,g, or c
  misc_feature (598): n equals a,t,g, or c
gggtctctngcaaaaatccatcctaaaagtatgttccttagaactatacatngcaataaacatgttttctagctatagctctgtcttggtcatcctcattccctctctgatctttccccttgctttactaaataatttattaagcaatctttaattgtagtacaaaccacatctttgtcattctttggatgtagtgtcacaaaaatatcccagtccacatcagttacacccatagataagcttacagacagaggtaagaagggagcagtgagtggggtgcaagcattggcaatattgatgggcatcctctgtcctgtactgatgacctgaggttctggacattgggaattatagcacagactcaaaataaaacatttttttgccactgtgaaaaagtgtgttgattttgtaaattaatacaaattcttcaaagacatattcagaaaaaaattccatgatgtacatgtttaagtgaaggataactgtatgtccttacatagtgctgaaatatgtagaacattatagagctcatggatataaaatttgatgttgaacattatacagtcttcttaaatggcccnntctggctggtttaanngatt

SEQ ID NO: 110 - DNA, 440 bp, Homo sapiens
gccaagactggtgagtaagcagtcggcgtcgggaatggggagtccttggaccagagcaaggcctgctcacctgaagaccccggcgtggcgaaggctgctaccgagacgacggcggcgggggcggtggcggcggcgcccactcacgagctcacactcattccctctcccggggccccggccccgccctccccaatacagccagwcggcgggcgccttggaaagtttccggccctccaggaggcttcctggctcttgattggccagtgtgaacagactgtagagaccggcggtcacgtgacgctgaagattcccgcttcttaaagcaacctctcttgctacgtttgcgagtaggtgtgtattgttttaacacacgtttaataagcatattttattttttttaccaccacaatagtaacgaggaaataaacagtctcaaagac

SEQ ID NO: 111 - DNA, 332 bp, Homo sapiens
agatgttctcaggcacacgcttctaaagaaacattggagactcttctagtggcctttatctagtcactgctttaagcaaggaataaaacatctgtggctaaaatttgtaaaactgtgttcccacccacccttcagacctgacagaagagattttaggattttaagggaacagctttttcctgacctaaaagskcacagtagtgyaaaggccaatgtcacktaagtacctgttccccatctgtaaaataactttcagatactattcccacagctggaatcagtacartgttttgactgaggtattggaaaagcctatgagctcattatcattt

SEQ ID NO: 112 - DNA, 519 bp, Homo sapiens
  misc_feature (262): n equals a,t,g, or c
  misc_feature (463): n equals a,t,g, or c
  misc_feature (477): n equals a,t,g, or c
  misc_feature (486): n equals a,t,g, or c
gccagcatgcctggctaaatgaaagcttcttttcttttctttcccttggtctcaaactcctggactcaagtgatcctcctgcctcagccttctgaaatgttggaattacaggctgagccactacacccagctcaattttcttccagtgttgctgtcctcagtaatttcagcttaatcagcatctctcaccatgkccaatgacagaccatgtacacagtaatatattcagagtgacacattgaatacagtaaatgtgtgtggnaattttttaacatgctctatgctgccatatgtgaaatagtaagcattcaataaatggtagctttcctacataaatacccagcaacagtactgtataagcttttacagataatctgtaaaatatggatctttacattatttatggtatcagaagtgataatagacaccctggtttgaatcttggtgctacttaattcataanttcacattaatacntaatatggntttttggacttttgaaaatgatggtaactgacg

SEQ ID NO: 113 - DNA, 729 bp, Homo sapiens
  misc_feature (17): n equals a,t,g, or c
  misc_feature (29): n equals a,t,g, or c
  misc_feature (155): n equals a,t,g, or c
  misc_feature (695): n equals a,t,g, or c
  misc_feature (714): n equals a,t,g, or c
  misc_feature (716): n equals a,t,g, or c
  misc_feature (720): n equals a,t,g, or c
cttggaatgaatttacnataaaccatatncatggtatacataaattatgtttcttctccatataacttcccaactttaccctatttatcaaaagcttgaatttggtgatgtcacatcttcctggtttgttgggacaatcaatccagtaactaatnccaggaaaacttacacacaaaacttggaatggaaatggtgttggggaatttcagaatccctgcaattgcttttttcagtgcttctgagcmatgmttataaakcatkgctyaraagagatatgcttgtgtgtgaaggtgcttccagtacaaaactaatgttttttaattcttgcaaaataaagtgtactccactcagttttacatctttatttttgatgtgccaagtcagacatttcacttcctcccatgattaatgaaggatgattcattttttaaaatactacatactaaatctgtactgtgtttggtcatcatagctctaaccaccaatgagtctgaacccaaatgcccagtgctgttttcttaggagaatggattttgtctgctggttacagatttctgatataccagttccagcttttctaaaaatgtattgtcataacatgtagaacagttttttacaattgcttaaatattcaatccaacttcacatgtgaaaaacatgtttacctgcatttattctcatattatttaatcagngtttccaaactgatgcatncntcanaattatcta

SEQ ID NO: 114 - DNA, 402 bp, Homo sapiens
gcttccaggtgccaaattctgtcacagcgatcttttgctgtgcaataagccatcttgaaaacactggcataaaataatgattatttattaccaatttttaaaaaagagagaatcctggcttctgtgggtcaggactttgggcaaggcacaacaagaaaggcttttctacttcatgatgtctagggtctcagccagaagccccagagctgagggtgactctagtatatgaggcggtggctggaggatccccttctaaggtgttctttttagtcctgtgtctgacacattggcagggatggctggaaggctgggctcarctgggacggttgctcaracacctctctgcggscacttyarcatggcagcctccatgggtagtgagacttctgaaatgacaggtca

SEQ ID NO: 115 - DNA, 301 bp, Homo sapiens
ctgcctcccagccagccattaattctaaggaaatgtcttttgctgaggtcgttactgctattataagcttaaaatggaaaaacataataggcatatgagttatttttatgggttgatgcagtttccaatggtgtgtactaatttgagaaaatgaatgtgtatacatacaagagtaagtcagattgttagactcatccctcagtattccatatgttttgtgactgattttacagttctctctacmtttctcatttacaaaaaawaaaaaaaagaaaatttgattcagcaattcctaaaaagt

SEQ ID NO: 116 - DNA, 771 bp, Homo sapiens
  misc_feature (1): n equals a,t,g, or c
  misc_feature (657): n equals a,t,g, or c
  misc_feature (673): n equals a,t,g, or c
  misc_feature (742): n equals a,t,g, or c
  misc_feature (765): n equals a,t,g, or c
  misc_feature (768): n equals a,t,g, or c
ntaaccctcctaaagggaacaaaagctggagctccaccgcggtggcggccgctctagaactagtggatcccccgggctgcaggaattcggcacgagctccaagggcctgttcttgcatagaaatatgaaaaaatgagcaaagatggtcagaatcaactttgtcagtctctagaaaatagtcaaagattcaaacaaatgctgaatcaagaaaatgatgacttaagtgcagtaggaaagctttgtggtattttcccttagcctcacccccaccaactttagtgtggcaggagtctgaaagatggcagtctgtgttctcagtgtgagtacctggtcccagagagggcagagcagaccttgttctcagaaaattgtgtttatctgtttgattcgtctgcagaggggataagagtgaaggaatgacacaagaggattgccttagttttgactaactcagaactctcagggcataaaagcagctatgcacagtgtattccttgaaaacattgaaaggcaaataaacaagctgctgctgcttggggcaaaacattgcatttgggtcaataaatagacatgtcaaaagtctgggaggaaggccagacgtggtggctyacccctgtaatcccagcactttggaagttcaagggcagatcacttgangtgaggagttcaagancagcctagacaacatggtgaaacccccgtctctactaaaaatacaaaaattaccgggcctggtggtgcntggcttgtaatcccagtacttangangct

SEQ ID NO: 117 - DNA, 484 bp, Homo sapiens
gtttagcttgtacttgatttttactaatagtctaagaactgaatccacagataactgtgaactccgtttagtcagtagtattactctctatccagctttttttcttttttttctatgcctataccactaacatattgtagaattaatttattttgaccttttctgtctccccccctccctttttaagaatttcttttaaagatggtgataagtaagtgaaactttgaaaggtaggcagtatcagatctacataattaagaactgcaggcaatttatggattactttcctttaaacttccaaagatgtaatagtataccttttagagatgtggctactgctctctggagagaattagggtaagcagattttcactcatactttatgagctcattaagtatgggcagttcaaccgtttagtaagtaaaacaaaatatgactattttgaagattaaatctgtttatagtaacctttagattatgtac

SEQ ID NO: 118 - DNA, 586 bp, Homo sapiens
  misc_feature (231): n equals a,t,g, or c
  misc_feature (450): n equals a,t,g, or c
  misc_feature (544): n equals a,t,g, or c
ggcagtgtgtggccatctaacgtgccatccagttcttcaggctgtcattctgtcagagcctggagtcgaggctgcgagggccctggctggctgggtgttgcctgagagttgcccaggggaataagacttttaagactagattttgtgctcagtgcctcattcctctgcgactttgcccatggacatgtcttagaaactgaagttgcttcagaacagccctgagaagggcanggkcaagggcctgacagaagaggaagtgctccttccagagggctcagccagagccccatgggtgtgctggtcagcaggagggcagtcggagcctcaagccatccatgcctctctctccttacaggtactctgatggctaccgcagctcctccctcctccgggccgtggcccacctgcggtcccagctctgggcccacctccctcgagcccccctagctnccagatggagcccctctgcctggtgctgggttgggggarcctgtaggccatggtactgagaagcatcccactctgcttggggcctggtgagcanaaggccctctgcagtcacacccagcggggctcgttactgagt

SEQ ID NO: 119 - DNA, 629 bp, Homo sapiens
  misc_feature (2): n equals a,t,g, or c
tntttttttgagacgtatctctctctgtcgcccaggctggagtgcagtggcaagatctcggctcactgcaagctccgcctcccaggttcacgccattctcctgcctcagcctcgcgagtagctgggactacaggcgcccgccaccacgccctgctaattttttttatttttagtagcgacggggtttctccatgttagccaggatggtctcgatctcctgacctcgtgatccgcccgcctcggcttcccaaagtgctgggattacaggcgtgagcaaccgcgcccggccctcaaattgcatttaaaaaaaaaatcccctgaagttgaagttcattaagtttattcccttgttaaaacagaggaatgatcatgttgacacacagtgaaaacaattctaatgaggtaggaggcagtactggattctggaggtgaggcttggacaccagacctaattgatgattaactaaaacagggatggggcaaaaacactttcccataagacacactgaccagggtgccatgtcagtttgccattgccatggcgacacccagaagttaccaccactttccatgacaatgacccgatgacccggaagttgtcacaccttttctagaaatgtcgtcgacgc

SEQ ID NO: 120 - DNA, 415 bp, Homo sapiens
  misc_feature (403): n equals a,t,g, or c
ttggcagggtatcctgatggtgagatcgacctgagaactgagtggaagagaaggcgaagtatccagattgccaaaagggcttttattccttagctcagcccttcacgtatccctgcaaagagctgctcagcaaaaggtgcttattgaattacacctcataacaggcagaatttgaatgctgttcatcacaggagctatggagtgcatagttttatagagagtatctccccgcaggcaagatacatagaacaggtgcagaattacagcatatactcatttcgcctcttgttaaataaaagcaaagacagtctcatgcgatcctgtgtgctgagtagaatatccattatagagcattttcttttatttttgttaatatttttacttgtagattcccattaaaaanaaaaaagtatag

SEQ ID NO: 121 - DNA, 642 bp, Homo sapiens
  misc_feature (495): n equals a,t,g, or c
  misc_feature (497): n equals a,t,g, or c
  misc_feature (560): n equals a,t,g, or c
ccktcgggtcgcatctttcagtgcggtgcgagagggcccagtggcagaggcccagcaaacagcgcttgtcaggcggacctgagttcgagttctgactgtgccatctacgctatgactttggggcaggcgacccaccctctgcgcctcattaacccatgtamtgcatggaaaataagcgtctgcctgggttagaagagggctgtgtgtgaagattcaaaggacgaaggggaagagtcctcgctgggcgcccagcackcggtgagcgcccggccagtggcagcgcgctcgggctggggttgcgctcgggctcggttccccgcccccggcagctgcgggctttcccagctccggcccgggcccttccgctctccccggcacttacagcggtctctctccacttctcccttctaggaccgcggcggctaggtcacctcctccggacgccgacacgcgctgccctggcaaccgtcaccagggaaacaagcgacgtcactntngcgttttcaacgctactctacgggggccgagggggcgccaagagttctgaaagtgacagacgngctgatggcgcgctgggctggatccaagcgagcacgatctcgagggggggcccgtacccaattcgccctaatacgtgacgtc

SEQ ID NO: 122 - DNA, 554 bp, Homo sapiens
  misc_feature (421): n equals a,t,g, or c
  misc_feature (429): n equals a,t,g, or c
  misc_feature (430): n equals a,t,g, or c
  misc_feature (474): n equals a,t,g, or c
  misc_feature (496): n equals a,t,g, or c
  misc_feature (515): n equals a,t,g, or c
  misc_feature (520): n equals a,t,g, or c
  misc_feature (525): n equals a,t,g, or c
gctgggacatgggtgcaggcactccttctctcgccttccctttgccctccttgctttccttctcccctcttcttcccatgggtctcgggtctcatcactcaccattgagggaatcctcatcgaaggacatcgctctttttagaaaccggtttaaagcctccaaactcctcatctctgcatcccaagctaagatctggcaccaaaccacacacattggatgcaccgactgagtggcactgccccagcccctgagcaggtcccagccatcatctcctctgtggctttgctcatagaagttcctttgttttaactctctttcacctggaaggaaagccaaggggacctagattttactgggcactcttagacttgggagagacatttggaaagagggtctcccccctgargaggacactgcgtntgkggsanngggcagwaaaggcgggggtggcctcggagaggggatgacaaggntggtggcaaggaggcttcaggngcctcaaaaggaacactgngttgngctgnctgggggggaaaaagggggtttttggttt

SEQ ID NO: 123 - DNA, 440 bp, Homo sapiens
  misc_feature (399): n equals a,t,g, or c
  misc_feature (410): n equals a,t,g, or c
gtcaaatagccattttgtttggcgtggtggagaaaagacaaaattcttgtgcacagactgatatttgtggggttttgttttcaactggccaaataaaccagctgtgaaatcggaaagttctgtgaagcgcaggctgcacagagtttggggagaaagtgcgctggtcagaagggcatccattcatttcccagaacagagcaggcaggaggagctacaggcccattttagaacttccacttctgattctagattcaggacagcagttctgtgcgtccatgccccggggaccaatcacacctctggtccagatttcagaagccactgagaatgatgccagtgccttctcaagctcatgatcatgtggctaagcttaaaagtctcagggaattcaattccacnggggccctttncagacattaaacaatccgctttgggccaca

SEQ ID NO: 124 - DNA, 275 bp, Homo sapiens
accatgacatcccttctcattaaacgtgggaaacaaaaaaggatttagatagagggcaattttaggaataaaataaataatgacagtaatggattataacccactgaataaaacagaaagacacgagcccataaataaacaaatgatttaaaagtttgactaggaatgggaatcctaaataatttcaaattgcctccccacaaaatacttattaattagaaagaggaaaaagagacacgctacagtgaagaaatctgggaggccctatcttaatc

SEQ ID NO: 125 - DNA, 422 bp, Homo sapiens
  misc_feature (320): n equals a,t,g, or c
  misc_feature (368): n equals a,t,g, or c
  misc_feature (381): n equals a,t,g, or c
  misc_feature (395): n equals a,t,g, or c
cggtcgctccgggaaatccgggccctaggattgtccactcatcccagtatcagcgagatacggggagatagagttagcgacaacgtgagccagagctggagcacgtttggtgagagaccagaaagcaatggaggccggasaggggaaggagcgcgttccgaaacaaaggcaagtcctgatattctttgttttgctgggcatagctcaggctagttgccagcctaggcactattcagtggccgaggaaaccggaaaagtggctcctttgtggccaatttgttaaaagacctgggggctggagataggagaacttgctgttnaggggggccaagggtcgtttccaaaaggaaaaaaaaatgcatttgcanttcgaatagccanaccggggatttgtngttaaatggaaattggacccggaagaa

SEQ ID NO: 126 - DNA, 594 bp, Homo sapiens
tttaaaagtggaacaaatttatttaatgtaagttttatgtgacacaggagccttcactcaaaaaccgagtgaaaactacttttgtggttaggtttaatgaatgatggacagttgtatagaagtatgattgaacaaaaaaggcatatgatctaatggtaataaactggggaaaacttagcaagtcctcagattcttctcagcctctctgtgtaacatttcttccttctgattatatggcaggtcacctgtcacatgaggatcttcaagagagagagggtgggagaaggtcagagggacctttctgtttttgtggttttcttaattgycttctgcttaaaatactcagtatgctgaggggccatattttggggtagcatttcctgaactgcatcagcatctagcatactggtgtgtctatttctcatttctcggagtgagcattgtgctgaccctgccatttagtcatcaaatgttgaagcagtctttcctagccctctaaatgacattcaaatgggtataagcagttgcccctgaatgttaacaagataagatcattctgagccctaaaactactaagactaatggtcatttcac

SEQ ID NO: 127 - DNA, 425 bp, Homo sapiens
aaaaaagaaaaaaaacagctctgtgctgtgcaagtgatcctcactgaaatagatgtgcttgctaaaatgaggaaagctgagatggccaggcctgggcatgggacatggtggtcagctggcaagtggggacctgtagggcmcggaagacagagtacatgcctcagcaattggccaaggcaagatccagcctcctgtgacaaaaagccaagccttcggccttcagtctgagggtaaggagatcacatgctcttgttctctgatctgtcccccaggtggcagtgacgaaagaagagactctcmcsgccgaggccccagtgcatggagagaaggaagaaatcaatttcctaattggtaccatatacatcaggtcaaataatttcttattttctascctgggcaacacagcaagactctatctcaaaaaa

SEQ ID NO: 128 - DNA, 534 bp, Homo sapiens
cctcatcttccctgatcacagttgcccgggtgagagagctgaggctttataagcgtaggcccmggtgctttccascagtcmgcacagagctggctgaaaccggggtcttgagcagagaggctcctagcgacaccactgctgctttgacttcagtcacgacctgcaaacagatgctatccccttaaagtgcattcatatgtcagctttttataattgtacaaagaacatgtttccattaggcggctgagggcagctaagctgagccataccgttttcactgcagaattcaaactaagtggaaatccttatagtcttcatgtagaatgtttgactctttagccaaataggtaattttgtctaaaattcagtaaattcccagatggattattatcttgtggtaaatgattttggggtgaggggacattgaatcaggtctctgaaagaatctggggtttttagtataatatgtatgattccatctcatttcctttaactgagctcaaagttagaaagaaaatactgcctaatttgtca

SEQ ID NO: 129 - DNA, 593 bp, Homo sapiens
  misc_feature (154): n equals a,t,g, or c
  misc_feature (579): n equals a,t,g, or c
cacacttcattaacaaaagtaaaatgatgaaaaataaattggattccattgctatctaaactctatattccagtttttctaatttttaggtaaccaacactgctcgtgttagaattctgaatttataaagtccccttacagaacatttttctcntgtactaaaacacagcttgagaatctgttatctgaactctgggtctctaggtctttctaaagccaagtttcaggtctatgtgcagatgaacaattctgaaataccactctacacactgaggaaccttcagtaacaccacattacctacagaataaaatccaaattctgtcttgctcaccacaggttgctttcagtctttctttttggcttcatctcttattgctcctcttcagggacctgtctactgtccgscaaatgtactggctcatttctccttgagagtctttgactacactctcccgtcttttcttcacctgtctgatgccagtcagtctttcaagactcagctcatttcaaacctcctcaggggagcctttcctgacttccactctcctagccgtcattgtgggtgtcaattattaagnccctcaatcacaaa

SEQ ID NO: 130 - DNA, 519 bp, Homo sapiens
  misc_feature (340): n equals a,t,g, or c
gctttatctgaaatatcttcatagacatgaatatgaaagttctgaaaattgtgttcaatggcccgtgtgtcccagaagatcctaatgtaaagatgcatatttataaagtaatttatagaataggattaaaacatatgtagaactttattaagaaatataatgacyytgggaccaattacaggcccttgaacagccacaataggctcaggagggctgtgcttctgtgtaaagtcccctcccagacaccamcagggtacagagctgggatggtgcatggcttgggcaagtccatctgggcagagagagaaggccaaggtcagcctgtgggtggggacatggncggcctcactccacatttgtacctcaagcctcccagccacaggggcgcctcctggggacccagcttgggcgtttccattcatggggggcacccacacgtgtgggctgagcccgggtatgtgggaatgtggggggtccaacccaaggaaggcaggaacccacaggggcttgtgctgggcc

SEQ ID NO: 131 - DNA, 441 bp, Homo sapiens
  misc_feature (316): n equals a,t,g, or c
  misc_feature (416): n equals a,t,g, or c
  misc_feature (436): n equals a,t,g, or c
gtgtttatttcctgacttggcttagaattgtgatgatgattgtaagaccagcctttgaagtaaaggagtttgagctgcrcctttaccccatgtgcctgtagactgacacatggtgtcaccaacattgagcaccccctgccccccactccagacactgtgctctctagtaggtacactcatctctacctgccttgcaatatttgtatactgcaggggcagtgtctgggttctggccctggctctggactctagtgtcctgatggagaaagtaggtagggagactggactggattagtggtgtttgaacttttttttncttttgtttaactggaacctcttttccaaatgaaatcttaaaggcaaccctagtatataaaagagtgaaggaggaactgctgaggattaagctgagcatngggccccatcctcttttccnctaga

SEQ ID NO: 132 - DNA, 778 bp, Homo sapiens
  misc_feature (2): n equals a,t,g, or c
  misc_feature (382): n equals a,t,g, or c
  misc_feature (576): n equals a,t,g, or c
  misc_feature (578): n equals a,t,g, or c
  misc_feature (730): n equals a,t,g, or c
tntgagtcaaagcactaatagaccaggcaacttaccacttggagtggatttgccttacttttgccctctcccattttctgttttgagttaatttatcttgtaaagtctgttttcctttcccaaggaataattccttttgtctacctaacattgacttatgtcttagactgacactgttttaggcttttcactaggcacattccgaaggtaccaacaagttaataacatcacctactctccactaatagatgctatgctaagagaagtgaataatctttctttggtagaaaataggctgagatataaggtgatattgctattgacctgaaaatgtgatagaacttctggttgcctattgattattcctccatgtctgataaangaatctgcttcctaccatttgtacttgtcttggagctggctataaagaagtatgctggtttgttatgtactcttttcaacagtatcatagcccaacttcatctcattgaattgttcacatataccagagtactctctcttgaggaacacctgcaggcagatagttagggatgaccatgaggagcataatctcananagggatagaagtacacttatacaacagcacttacatgggcggtttctctggtagcatgtcccataagaggccatatgcttataattaatgtgtaacttgttgatgcttttgagatcaggactgctccaggcacgctaaaaaatgtgctaaangtatagtgggctctctaaaaagaggctatttggggagtctctgaattt

SEQ ID NO: 133 - DNA, 1128 bp, Homo sapiens
  misc_feature (1013): n equals a,t,g, or c
  misc_feature (1081): n equals a,t,g, or c
tttttttttttttwttgaaaatctaaactttatttgtagccagtatttcttcacacaaggttttcccgcacccctctgcctccatgtctctttcctggcccagagagactgactccctccaaaggagaggaagccttcccctcacaccttcaaatgcccttcagtgatctgtagaacaactcggggcatattcaagaagggcaaaacttcatgcctcttgcccctcaatcctcctttcctttggtttgttttccttacttcttgccaaaaaacagctacctttggcagggaagttattacaatccattgcaagtacttcctccaataatgaacacaacaaaatcctgtctttattcatttaaagcacgaagctggccctctttacaaataccctgtttttaataaatcctcggtaatagacatccattcacgagaataaagtgggtacattggagctgaagctggtggtacgcaaagagcagatcttcagctcatgtctgtgtgtgcacagcaaaactcattagtgtgcactttcaaataacacatagacagaaacatattttcccgcatgcatgtttttcctggaaagattcacaaaagactataacagcattcacctttaagaacaaaaatgagagcaggaagaacttccacttttcattttaatgtttctgtactgcttgagttttttagtgatacgcatatattatttctattctttcaaaaaatcagagggctatctgattatgtctttattttctttgggttacatctctatatttttctaaaaaaaacttattcttaaattaaaaaaatgaaaggcaaagacaaactgcgtttagggagtgattgtttctcaaattattctacctgacgtggtgctgcataattttattatgagctctcagttcctccacagatccatacgaacaaagagcaaaagtgcaatattccaatggggatcttttgggaaaatatttaaattctgggtctcccacccaaccttacaagtngattcctctaacttttgttaaccagataagcaaaattgtctccagagaggtgaggccacaccagtggncagtcttcctacaggccaggtcaccgtgcgcgttactgcattgaagg

SEQ ID NO: 134 - DNA, 213 bp, Homo sapiens
gctttgagggggttagactatacaatcgacatttaatgagggcctcctgttttctgggcacagcacgaggcccgaggacacagaggtgaatcagactctgcctctgaccttgaggagcttctggaccagtggaaaggaaggcagtcatgaaaactgatgatccactgaggttctgctagaactaagtcgtccaaagtgatatggagcatcaga

SEQ ID NO: 135 - DNA, 331 bp, Homo sapiens
  misc_feature (307): n equals a,t,g, or c
  misc_feature (319): n equals a,t,g, or c
  misc_feature (331): n equals a,t,g, or c
gctggcctgcctctggtctcctcctacccccactaggctcagagaatctcccctccacacccacaccacaacctactttagaagggctgctgcatttcctccaggctttctgacccccttcctgtccctgcagggcaggggccccgaggagctggaggcccaagggccttgttctggtcccagggcctggggacacctgccaccgagggccaagaggaggatggacgtggacacagccccgagagcctggyccggacacagcagcagctctgcagaaccaaggcaagcattggggacttgttgggantcggggggcaanccaaggggccan

SEQ ID NO: 136 - DNA, 405 bp, Homo sapiens
  misc_feature (6): n equals a,t,g, or c
  misc_feature (25): n equals a,t,g, or c
  misc_feature (365): n equals a,t,g, or c
  misc_feature (397): n equals a,t,g, or c
ccccgnacttaacttggccaccccngtgaaggaaataaagagccagaggtaagggtamctatgtaggtatggtgaaagacaatataaacagttttgtttgtaamttttcctgttttaaaggacagctgccctaaagcaataattayaaaactgtgttgatgggccttataatatatrgagatgtaatttgtatgataataatagcacaagggagtgaggagagaataaaggtatattggagtgactcttgactgccactattgaaattaagtggatatgaatccaaaagagattgttttaagatgttaaktgtaatccccaggctaaccactaagagaatacatttaaaatacmtatgggtaaanggaattaccaaagggattttaaaagatccatnggaaaaca

SEQ ID NO: 137 - DNA, 762 bp, Homo sapiens
  misc_feature (619): n equals a,t,g, or c
  misc_feature (635): n equals a,t,g, or c
  misc_feature (644): n equals a,t,g, or c
  misc_feature (672): n equals a,t,g, or c
  misc_feature (703): n equals a,t,g, or c
  misc_feature (757): n equals a,t,g, or c
  misc_feature (760): n equals a,t,g, or c
ctcgagatattcagggaagcaggcaattagtcagaggatatccatgtcaggagaacatcagactgtgctcctaggagtcttgagggtcctcagagatgggacaggtagcaggaaggtgtgggagtgggcaaacacagtacatgcagttttatctgcttcatttattggcccctcacttggaatttcatttgaggaaaagtttccactgctaaagaagcttactggccagaggagcagaaggaagcccagagttgtccaaagccggagcgctgcatagagtcaagacctcaacccagatcactcaactcacagcctggggctctttctacctccccaggccacttcatcatttaatcggggcccagcactgagccaggcacctttgggatacactgggcttctgcctctaagagctgactggctgggtggggagccaggcagtgccagagaggaggtgctagaactagatgccgcgtgcataggagtgtgtcagcagctgacccagggatctgttgtttgctcctccttccctagaggggctcagcactcccttactccaggcagtgccctgcagaggccacagctaaaccattccctactggggtctcctggagagatngtcccgcctacatctncctgcatgncagcctgcttatccagacccatctcttncagaacacagcttgaagcatcaggagaagtnaagcaaggcatgctcagagctgctgttcctgctgccagcttttccaagttccanganct

SEQ ID NO: 138 - DNA, 320 bp, Homo sapiens
atttagagtattctgaatttcagtatgtatttaccatttttagtgacatttatactttagtatttttcatattgttagttagcatttcgtcatatcaatgtgaagatttcttccagaccatggctggagaaggaaagaaggtgtgttttgcctgattcagggactatagagagaaccaagttctgcaggcctgtcacctaagtctcagatgagtatgaattctyttgtgtttttcacagatttttgcagtggcaggaccaagttccaaatgagtcatagccaagtctacagtaaagatgtggtagtattctgctttgaac

SEQ ID NO: 139 - DNA, 430 bp, Homo sapiens
catgggctgaccttctggccgctggatacaggtatgctggttgtcgctgaggaagaagccttcccggcagtggcactcatagctgcccatcatgttgacacagctctgctgacagccgccgttgccctcggcacactcgtccacatctgtgcaggataggtagtcagtggggtcatggggtacaggcarggtcaagggtatatcccaagacttcagcaccaaaggcagtcttaagaactactaccccctaagcccagccttaagccaggaagtcctcacacccttgtcagctaatatttcactaagtgtaaaaargctgccctgarggcagagctgggaagctaagcaagtgggggaaaaggggacctttgaamctcaaatgtcacctaggtgaagccatgcctccctttccctcacctgtgtaaactgg

SEQ ID NO: 140 - DNA, 909 bp, Homo sapiens
  misc_feature (899): n equals a,t,g, or c
ctcgtgccgctccagagtagctgggactacaggcgcccgccaccatgccccgctaatttttgtgtgtgtgtgtgtgtatttttagtagagacggggtttcatcgtgttagccaggatggtctcaatctcctgacctcgtgatccgccagcctcggcctcccaaagtgctgggattacaggcttgagccaccgcgcccggctgaggtttggtatcttttaactaaatacttattattctttaaaatttgtaattgtctggcttatagtctttcawttagtaagccctcatagrtacytttatatgtatgaatgaatctgagtgaaagcaaacatggggataacaactgcaaggttgagcaatatgcaccagaaggatattctagaagagcagccgtacatagcttcaggagtttcgggagttagcamcaagtgaagtcaaaaccaggcaggcaggtgttttatattacagaactgaaagtaggagatcaggcaggggagtttcaatcaaacctaaatctgtagaagacctaggagttcaaagcagcccccagctgtagaagggttgggagctgctcaaaaggatacacacggcaagagagaggctccaataaggactcagttacgcagttatgcgagcaaagatccaaagcacagaattgctcctttggaacaagtgaggatcccaggtgtgagacccgaggagatgactgacttagttactcttctcagccttatattcaggagtttttcaaaacaccctgccagagactagagaattcctgctaaacatacaagaatggggaaagcggaaaaatgatgagaatagaaattactaatgggttggcaaaaatatggstccagsctcaaattctaaggggggaagggataagttgcaaagncgataattag

SEQ ID NO: 141 - DNA, 360 bp, Homo sapiens
  misc_feature (331): n equals a,t,g, or c
  misc_feature (352): n equals a,t,g, or c
  misc_feature (354): n equals a,t,g, or c
cactgctcccagctgggaaccttcattttaaccagcattcctctgcagcacactaaagttttggaagcaacagtctagactaaaatcctaattcctaaacctagcgttcgaggtcttgcaaagtttggctttccttactcctcaacaagtaccttcccctgcagccaggctgaagggttccttaatgtgccttctagcttgtgtctgctcaggcctgcccttcactggcatctttcctatctctccttaatccacgtgatgccaactcagcttcaagacctaattcaagtcccatctgctcccagcagactttctgataaccccagcttcntcccaggggtccttcctttcncngattca

SEQ ID NO: 142 - DNA, 322 bp, Homo sapiens
  misc_feature (205): n equals a,t,g, or c
  misc_feature (282): n equals a,t,g, or c
tcagagcctacctgcatgacctcaagcgggccaagatgggtctcgggggcatgcctgacaggaaccacccggcctgtgccaaggctgaccttgaggaagtggtcagggtgtgcccaggcttcaaggcgtacctggacatcggccaggtaaggcagtctcttggcttagccaatagctgagcaagaatctgtttactccttgccangctagaccaagggctaggccaagatgcagaggaaaaatttcactccctgataacagtacccatctcctccagccgtngtgaggaccgaataaaacgtgtgtacagtatttagaataa

SEQ ID NO: 143 - DNA, 253 bp, Homo sapiens
  misc_feature (43): n equals a,t,g, or c
cttgcataacacaggggttggggcgccgatccccgacgcatanaaatctacatatcacttctgactcttccaaaacttaatagccggctgttggctgaaactcactgataacataaatagtccattaacacatattttgtatgttatatgtattatatacctgcaataaagtgagctggaaaaaacaaaatgttattaagaaaatcataagagaaaatacatttcctaagtgagagtggatcatcattaaggg

SEQ ID NO: 144 - DNA, 768 bp, Homo sapiens
  misc_feature (43): n equals a,t,g, or c
  misc_feature (134): n equals a,t,g, or c
  misc_feature (663): n equals a,t,g, or c
  misc_feature (667): n equals a,t,g, or c
  misc_feature (698): n equals a,t,g, or c
  misc_feature (768): n equals a,t,g, or c
gcttgtcctttggcctcccccgtgggccttaaggctcgctgangtcttttttggtttggaaactctgaaacactaggtttttcccacctgtacggagagacagaccgcaaatacagaaacacaaaaaggtgggncgtgggaaggaatttagaagagaaaagatatggttaattaaggaatgacggtaatgacagaggttggctcaggtggagcacagtgcataaggtgttcccaaggacattagggcattcggcatctcccgtctgaactccctgttccgtcactttggcagcacccactggccacgtggtctcccttgtcctgccagccttccaccgaccaccccaggcagtgggccataccactgttgggcaatatttgagcccctccctgtaggaagttaacacctcatcacgttgctcaactcacccacaggcataggattttgctttagtcaatgaaatgtgagcagtgacttgggtcaccttcaggcggaaaattcgagagtcagcctgtgctgcccagtgctctcttttcctctgccacagagacaggctgctctgccacccaagacccagatggagaggcaacgagggttagagtggcagccagcccacaatggatattaatgagaaataaacctttgttgatgtaagatgcagntgtnctggggcggtgggtcgctgcagcacccgctngcttcccctgttctgtctctaggctggctcacccatatgggagaagcatcctcgctgagatgcttttggn

SEQ ID NO: 145 - DNA, 578 bp, Homo sapiens
ttttttttttttttaacagcgaaagtgagatttttaataaacagtcagtcttgcaaaatcgggtgtctgacggacaggcacacccagcagtttcaacaagcaatttgtccgctagtgtgcaggctcctcccccagtttcccacaggctgagtactatggggtcacaaccttcctggacgtcacctattgattgttaggcaggggctttaggtgtttttgtttgtttgtttgtttttagggttgtcttgctgcattttgtcacagcccacaatgcattgcaatcctagtcagctcaggggctcttcaagtatttcacttacgacctaagtagctgggctgggctgataagaacagacaaagggagctattttgcaggctagtagtaagctttcattttagactaaacttcttcggttctggtgaaggcaactaatggggggtaagcgccggkaaagggggaggcctacaagcaggcatcagctwtccaagcaggggcctcgaatatccsgtttcttctgtragtctgctgacctaagccattttaaggcacttgtgcttgggaaatggggaacactgtg

SEQ ID NO: 146 - DNA, 362 bp, Homo sapiens
  misc_feature (274): n equals a,t,g, or c
  misc_feature (344): n equals a,t,g, or c
  misc_feature (353): n equals a,t,g, or c
ggcacgaggtaaagatggacggcgcgagggtctccgccctctgctccgggctgaagcgctctgagagaggcggcagcggcaactcgagccccaacagtaatttagtgttggtagttttggcagcagctgccgaggccggagcaatggcggaactggagcacctaggagggaagcgggcagagtcggcgcgaatgcggcgggcagagcagcttcggcgctggcggggctcgctgacagagcaggagcctgcggacgacgaggcgcggggcggcancgcttgaccaggcgcgggaccccagggtccgtttcgaggacggtgtgtctttcttggccgcttgttctancggggacancgacgaagt

SEQ ID NO: 147 - DNA, 448 bp, Homo sapiens
  misc_feature (382): n equals a,t,g, or c
  misc_feature (414): n equals a,t,g, or c
cttgaatcctgtgggatgagaactgtcattacagagaggaagaatcaggacattatgggcacatagagtagtggcatctacgccagaatgggaaaaagcctggataatttgcaaaggaaatcctgtattaatttttgccacattaaaaaaaaatctttttttagtcctgtggtgttattttgcactgttttatgaccttttcctggatgataggtattctgattacagaaaaaaaaaagattcctcttctctcttttttttaaattttaaattattctttcatgtatgtgtcatatgtagtctgggagcttgaatttggtaaggcaatcccaggcttgccatcttggcttagacagaacaatagcataatcctcactaaggntttctaacttggtgtccccttacatagttagncccctactcaactggagctgcctgaggtgggttg

SEQ ID NO: 148 - DNA, 818 bp, Homo sapiens
  misc_feature (6): n equals a,t,g, or c
  misc_feature (102): n equals a,t,g, or c
  misc_feature (773): n equals a,t,g, or c
  misc_feature (799): n equals a,t,g, or c
gattcntgacagatggcaggaagcttcggggagagatttctgaaagacactcctggggttcccaaacaccgggcaactctttttcccagaggattagtgggntggagggttagaaggagaggccaaagtcaggtttggccttcggatccccctttcattctccttttgccaccgtaaaccaacttttgcttacagttagacaccagttttcggcagatgaaatccctctgatttcaggcattttgtcaattaagctgctcagcaacaataggataaacttatgaaaagaaaggagtagcagtcccacagacaaagcatccagcccctgcactgagacagtatagggaagggacttggtcctggcagacaggacagataatcaacatcctagtgggcctyacacatgtgggcatattcttttccataccttcttgtctgttttaacaagctaaccccagtcacagtagcagagagagggtccatcctaacttagctgaccaggctggattcctaatcataaaaccaaaaaaggaagaacctaaccatttctctctttcagctatgtgttccaagattactgaagcaggattctggccttcctgataagaacatgaccagatccagctggtttgcaacaagatgaacttcagtgctgagctttcaccaagtttttctcactacaatctcattgtaatactaaaatctccacccaagatggaggttatctgccattttctgtacatgtgttaccagaaaggggtcctgatccaggnccccaaaagagggttcttgggatctngacggcaacagagagttcg

SEQ ID NO: 149 - DNA, 518 bp, Homo sapiens
  misc_feature (462): n equals a,t,g, or c
acttttgaaaatcaagcaaattactatggggtttcttgggtcttcattattccatttatatatattttttatttcgaataataaatcaacctttatttttggcaataagattatcactgacgaaaatatgtacagttcaagaagtagaaataatattttccattagttaatttaggaaatattggaatagcatattataattatttatgaggttcccaatgttgtttttcacagaaaataaggtaaacattcaacttaaatcccccatgaagttttttcatgctcatactcataatcattatcacataatgtgcttattcaacaaactttgtatctgggatatatttttaacaataagtttgttagcattatttatttatctttaggaggaaaatatttgcatctgtttatttaccctttggaggccattaatacttgggccactccaccttggaattgccnttggggtgtatccaccatggggcttaaaattaaatttgggggtgtcgccgggtttt

SEQ ID NO: 150 - DNA, 489 bp, Homo sapiens
  misc_feature (461): n equals a,t,g, or c
caaacaaacataagtcaaaccatcataagttaagttagggaccatctgtatacttttttatcttatttaaatagcatccttattatagaagtttgaaaattacaaataaaagacaaaaatgatctctgatttccctagcaatgattctgtttccattgattcmaattactaaaaatttaaacaatattcattggtgtgtcaaaatacacttgtgcattttctgcagttataaagatatctttgggcttaaaatatttttgtgtttcgtattactttcttggtgtagattcccaactaagttaagagttataaacataacgaaagactccatgttagagtgtgtgtatgtgtgtatgtttaaataatacatttgactagggcgcagttgctccatacctgtaatccmgacttgggagcggggcaggggggtcacttgagggccggggggtttcaaccagccngggggtaatgtgggcccagggggttcca

SEQ ID NO: 151 - DNA, 473 bp, Homo sapiens
  misc_feature (66): n equals a,t,g, or c
cagcattttccattgcccytarggraacttgctakgkggttaaccccagttatgattagtcaaacngggaaaacactggatcaaacytaaaawtgtaaaawcctgtctaacttttaaawatactttccacagttgtacttaagttcaattaactacagtatagagaaaaataattattctcttctttgcacccggagttgcaaacaaattaagtttacaaatctcatttaaacatatatctttgtaatgtaatctccgcggttctttctttgttctaccctcctgcacctgttgtcgatgtaatcattttgggaacagaaacgttgtgtctcaaaaagattcgttgtcagttcagccaagatgttctttacctgagattctggaaagatgtttatctatatcggaacacttctacattattaaatgtccttaagctttttcttttaaaaaaaaaaaaaaaaaaattctcggtc

SEQ ID NO: 152 - DNA, 440 bp, Homo sapiens
  misc_feature (418): n equals a,t,g, or c
  misc_feature (423): n equals a,t,g, or c
caaatcttggttgaaatggagaagaacagttgttcttcatggttgaggagttgggatatggttgccatttggtatcctctctttgcctatcactgttcccattatttcagttctgtgtcacctgtcattatgatttaattatttaagtaattttttaaagaaatttccattttaatgtggaaacccaggtttcaattttgtttttcttaaaaggtatttcacaaaagaaattagtcttgttgtagtgtaacatcaaaggaacattctgtaaaagactaaagttaggattaggaaaataggcttcactatttacccttgtatattaactgtgtttacagatattttttgggcttgtttttcagtggataactcagtaaatgtttaggctcaggtgtccttaattggatacctgagggtngtatnaaatattttggatgggt

SEQ ID NO: 153 - DNA, 442 bp, Homo sapiens
ccggttacactgcgcaggcacaacagagccgctcccctctcctcgccccgccaccgggacgagagcgcccgccgctgcatttccggcgacacctcgcagtcattcctgcggcttgcggcccttgtmgacagccggggccttcgtgagaccggtgcaggcctggggtagtctcctgtctggacagagaagagaaaaatgcaggacactggctcagtagtgcctttgcattggtttggctttggctacgcagcactggttgcttctggtgggatcattggctatgtaaaagcaggcagcgtgccgtccctggctgcagggctgctctttggcagtctagccggcctgggtgcttaccagctgtctcaggatccaaggaactttgggttttccyagtttgctgatggtcgccaaagttggarttagtatgttcaacagacccatt

SEQ ID NO: 154 - DNA, 440 bp, Homo sapiens
  misc_feature (401): n equals a,t,g, or c
  misc_feature (405): n equals a,t,g, or c
gagcgatgtggcctgggaacgcctggcgcgccgcactcttctgggtgccccgcggccgccgcgcacagtcagcgctggcccagctgcgtggcattctggagggggagctggaaggcatccgcggagctggcacttggaagagtgagcgggtcatcacgtcccgtcagggccgcacatccgcgtggacggcgtctccggagggcctggcactgtcatctttccaggcctgccctcgccccacctgagctgctgtatccatctcctctccttcacctcaggaatccttaacttctgtgccaacaactacctgggcctgagcagccamcctgargtgatccaggcargtctgcargctctggaagatttggagctggcctcaagctctgtccgctttatctgtngganccagagcatccacaagaattagaagcaaaaatagc

SEQ ID NO: 155 - DNA, 179 bp, Homo sapiens
  misc_feature (166): n equals a,t,g, or c
cctgaggcacgtcccttttcgtggtttacatgacaggccagtaacaggaagggcctggggagartttctgggctgagccacatgtgattttcctgatgggcagcactgggccacagctgggggctctggttggctgttgacttcccccagggcctggctgcatctngggtccctgtgga

SEQ ID NO: 156 - DNA, 248 bp, Homo sapiens
  misc_feature (179): n equals a,t,g, or c
gctccctgcctactcccccaccggggatttcagactagacgcttgaagcaaagctgccatcccagaagacgacatgctctcagcaacccccctgtatgggaacgttcacagctggatgaacagcgagarggtccgcatgtgtggggcgagcgaagacaggaaaatccttgtaaatgatngtgacgcttcaaaagccagactggaactgagggaagagaatcccttgaaccacaacgtggtggatgcga

SEQ ID NO: 157 - DNA, 186 bp, Homo sapiens
  misc_feature (1): n equals a,t,g, or c
nttgaacytsctccttttgcagstttctccatctcaattgatataactccatctttcagttgctcaagccaaaaacccagagtcctctctttctcctacataccacatctaatctgtcagcaaagcatggctgattgtaccttcaaaatatatccagaatccaatcactttttactgtttcttcca

SEQ ID NO: 158 - DNA, 419 bp, Homo sapiens
  misc_feature (150): n equals a,t,g, or c
  misc_feature (231): n equals a,t,g, or c
  misc_feature (234): n equals a,t,g, or c
  misc_feature (323): n equals a,t,g, or c
ggaaggtgaaggattcaggaggtacacctgatatatttctccactgttagcgtgtctttacaatgaaccccaaatcctttcacaatcataaagaaaatattttaaataagtagtttcctaatattgaaattaataaaaatatttaaaagnactatttttgtgggtctgtaagtgccagtagttttcctgtgattgtgaggatataacttctgctgatttccaggtatggtntcnccctttgccacatgagcctgatttgtgcctaatcccttggataagcacagggcaatagataccagctaccattttaaatccatatccanccttaccggatttaaaataaatttataatggcagctatttccccagtggattccaaatgaaggcatcaggccaaaatagatcccaaattcccggca

SEQ ID NO: 159 - DNA, 727 bp, Homo sapiens
  misc_feature (727): n equals a,t,g, or c
agtaaacaaatgcccctaatgtcccaacagaatgacttactattattaaaagccaaactaaacttctcctcctataatgaagaaagtaaaaaacttccagaacagttaataaacaaagatatgtaagtgaaaataagaccaaaaagggtaaaaagaaaaagaggaggtaagtgtaaaaaataacytacatgtgaagaaggttcattttcataagtgccttagaatatgtttaagcaggccacatggaaacaaagagataaagaagcaaaatatactaagccacaatcccctccttcctgctttccctttgacccagtgtccaggagcctactggtcagggccccctcaatgacccccctccccacctcaycaaagaatttagtttgggctagcttgccatcacctaagtgcagtcacttarggccrtaagtcaaatgctcagagtcttgagacagtygccatgtattatgggtggctgcaacaaaatgcagcaaaaaatgcagcaaaaagaccctaaagaacatacctgaagtcttaatacaactaccaataggtgatgcccaggaagactataaccccgtagtactcagctaatgaggaattggggaagggacttgcacactagggaagaaatagtttgttgaaactgtcccaggtgtacctgcactccagacacctgatcttgcaagactgtcgattaaaagtctctctttcgctgttcaaaaan

SEQ ID NO: 160 - DNA, 387 bp, Homo sapiens
  misc_feature (326): n equals a,t,g, or c
  misc_feature (364): n equals a,t,g, or c
  misc_feature (382): n equals a,t,g, or c
cctctgctttcatcctgttggtcagaacccagtcacatgaccacacccagtggcaacggaggctgggaaatatagtctttattttgggcacccatgtgtccagcaaaactgggggttccatcagtcggcaagaacgggagagtggccgatgcagtggctgatgcttgtatcccagcactttgggaggtcgaggtgggcagatcacctgaggtcaggagttcaagaccagcctggccaatatggtgaaaccctgtctctactaaaaataaaaaaattagctgggtgtgctggcgcacctgtagtcccagctactttgggaagctgangcaagagaatcgcttgatctttgaaaagtggaaggttncaattaacccaaaaattntgcca

SEQ ID NO: 161 - DNA, 521 bp, Homo sapiens
  misc_feature (14): n equals a,t,g, or c
  misc_feature (131): n equals a,t,g, or c
  misc_feature (433): n equals a,t,g, or c
  misc_feature (440): n equals a,t,g, or c
  misc_feature (511): n equals a,t,g, or c
tacaggacgcgggntatgccaccgatcctcactatgcccgcaaactcaccaacatgattcagcagatgaaatcgataagcgacaaggtgagcaaaacctacagtatgaacattgataatctgttctgaatnactcaagtccggcgggtcgctgccgataatactctgtaattgaaggcttataaggaacctccatgtccagcttgattaataacgccatgagcggactgaacgcggcccaggcggcgttaaatacggcaagtaataatatctccagctataacgttgccggatatacccgccaaaccactattatggcgcagccaatagcacgttgggcgctggcggctgggttggcaatggtgtctacgtttctggtgtgcagcgtgagtatgatgcgtttattaccaaccagttacgtgcggcgcaggaanagttagncggtctgactgcccgctatgagcagatgttcgaaaatcgacaattatgctcttccaccattaccttttcgntggcaacacg

SEQ ID NO: 162 - DNA, 513 bp, Homo sapiens
  misc_feature (199): n equals a,t,g, or c
  misc_feature (374): n equals a,t,g, or c
  misc_feature (435): n equals a,t,g, or c
  misc_feature (480): n equals a,t,g, or c
ctcagtctgtagcctgctagggatgcacggccacgctcctgtctttgaggtgctgtcagaacagctttctcctcggtatcccgccgggtttgactggctagtgggcttgctttggtttggactcacccagatctagtgcagggacacacacgggggccggcattgctcctttccgccatgtggagttggccggggcagnaggacatgctctggtttggacagcccggccctggggctggaataggaaatgcctgcgtccctttaccctgcccaggggccaacacccccagcctagctamggcttcccccaggtgaacgaggtggtcttcagccccggggagtcccamtgcgccacatgcagtgaaggatgggantgtgcgggtgtgggccttggccagcatggagcttgtgatccagttccaggtgctgaaacanagctgctctgcctggcatggagcccccgtgctgttgccgcctgancaacaacggctaacggcttggtaaggttgaagg

SEQ ID NO: 163 - DNA, 1284 bp, Homo sapiens
  misc_feature (65): n equals a,t,g, or c
  misc_feature (383): n equals a,t,g, or c
  misc_feature (1263): n equals a,t,g, or c
  misc_feature (1266): n equals a,t,g, or c
ggcacgagcaggtgatccacctgcctcagcctcccaaagtgctgggattacaggcgtgagcacangcacccggcctatttcttaattcttgtttagacaaggggtggattattcataagttttccagaaaaagggcagggatttcctggaactgagggtttctcctcttttagatcgtatagggtaacttctggacattgccatggcatttataaactgtcatgacgctggtgggagtgtcttttggcatactaatgtattatcgtataatgagcagtgaggacaaccagaggtcacttttgctaccatcttggttttggtgggtttgggctggcttctttaccgcattgtttcatcagcaggttctttatgacttgtatctngtgataccatcctgacctccyactcatcctgtgactaagamtgcctaacctaggaatgcakcccaataggcctcatcctcatttttatctaggcactattcaagatggagttgctctggttccagtgcttctaacagtttggcattttactgtctttcaataagcagacattgtaaatcttaatagagtccaatttattattttcccttacatagttggcccatttttggggtcttgtttaagaaacttttgcatactacaaagttgtgaagatattttcttatgtttccttcaaaaagctctattgttttttcattcatatttagatctactgtctggtggatttatttcttatgtgtggtgggagatagggaccagaattctttttttcatatggacatttcatataatccaacaccatatatttgtttttaagaaacccacraaaccttagacaaatttaatttaacagatttatttatttatttttttgatagartcytgstctgttgtccaggctacagtgcagtggtgcagtctcagctcactgcagcctwgacctccccagactcaggtgatcctcccacctcagcctccagagtaactggaactgcatgtgctctcctctaccactagctaatttttgtatttttagtagagatggggtttcactatgtcacccaagctgctctcaaactcctgggttcaagcgatccacacacctcagcctcccaaagtgctgagattacaggcgtgagccaccacacctggctaatttaacatactttaattgagcaaagaatgagaacctgrcagcctcttaacaagaataactccasaaaggttccagtgtggccttgaggtggaagatttatggacnganaaaggaaagtgacatata

SEQ ID NO: 164 - DNA, 585 bp, Homo sapiens
  misc_feature (453): n equals a,t,g, or c
  misc_feature (517): n equals a,t,g, or c
ataaatttcataagagttattctcagtgtgaattttaaggctaatgccagatcctgcaaaaatctatgctaaccaggctgtagtacagagtgttataaagaattttacttgtgtctaaaactacagtaattttgcttaggtaattgtgcttacctatggagcacaggaaggctcttaggttttgttcctacaagtttctttgaattttggagtaaatggaagtgtctgtctgtctgtcatctatctgccctatcataaaaatctttctccctaacattaaaatactgatccccgcccccaacttatctacctctattgtctaacacctatagtaggtgtgatcatgggataaaattcaactgaaaatgctatgataacattttatcgkttgctttaaaaatgtgctttgttttcaaataatctttacatagtgaactttggtggcgttagtgnatatgtttatgcctatttcttttttttacacaaattccttggcatattttttcataaagaacanaaaataaaatcaaaatttatttttaattcatgcttattgggatttaattattcagagcttaaaatatt

SEQ ID NO: 165 - DNA, 523 bp, Homo sapiens
  misc_feature (83): n equals a,t,g, or c
  misc_feature (448): n equals a,t,g, or c
  misc_feature (519): n equals a,t,g, or c
ctcctgtttgccttggtagcttcccagcttcctctcacatgactgtttctgtttacttctccctctggccttcctgcctgcgngtccctgtgccacctagagtctcatctaccgcactagacatagcctctgcaatggccccgcaccagggcctccttccagggcatatcccgtctctgtctcacccttctagtctgcgcttgcccttctcactccccagctctctctgttactgtcagtggagggtctgtgcactttgtcgttttgatcctatgacgttgtatctgtggctcttccttcaagtgcccaggagaggcccagctcctgggccagaaaggggttagtcttgaagtcttgggttggacatttcaccatggccagcccagagctcggctgggaaacagatgagagacaacatgtgaggaggcagacaggagctggggatccnggctctgagcacctgagaaggtttgggggaaggtattggtaatggattggattgtttcccccaacaaaagntttt

SEQ ID NO: 166 - DNA, 491 bp, Homo sapiens
gaattcggcacgaggaattattatatttattacatttagtctgtttttcgttataatgtgtttactgtgctcttctttaaaaacagaatcttaaattkggtatttaggaaggtttatgtttctgtggtccttttgcttatactttttttaatgcccttagcgmcccccccattttttatttagaatctgtattgtccatctttaatgacattctttaactttcacatgttgcttaaataccagttattgagttttcctactttccttttttcatctaccttctcttcctatttttagttgcatcattttttattcatcagaacatacagcacaaaacaaatagcattatcatataacctattattattataccctgttctcaccttaattttgatcttagatttgcaattaagtatatttaatgctaaattgctgaagtttctctagtcatttttttgtttgaataaagtttattttctagcagatttctt

SEQ ID NO: 167 - DNA, 322 bp, Homo sapiens
  misc_feature (52): n equals a,t,g, or c
aattcggcagaggtgaacagtgagggagatgaccgctcacctctgctgcttnccatcaggacaaacccccagagttccccagtatggtcaggctgaagctaaaagccgctgtccaccggattttgcctgagaaaggactcatctttggcttgtytctttccctttcctgcctcctttactcccttcccagtttccctgaggaccacattcttaataaatcacttgcagagaaatcctcacttcatcaagatctgcttctggggaccccgacctaaaacagtaagtcacctaggacccccatcattgtttttgagtcttctgg

SEQ ID NO: 168 - DNA, 446 bp, Homo sapiens
  misc_feature (298): n equals a,t,g, or c
  misc_feature (425): n equals a,t,g, or c
ttaacttagaaaaaaaaacttgtaggaatatgaagcattccccactgcctggtttctattttccttcctctgaggactgcgttttaacctgaacgtttttccttgcctgtctgtttatagaaaacaaagcccgattcccctgttgcgcctgttggagactgtggagttccttagtctctgccttatcagttgggttttcagcccaggtaaagagtaggggtagtccagtcggcttcacatttcccacgtgtaataacagttactaggctagggaagtagtagccaccgagcttgggancgaagtgctgtgtggaggcaggaataccctgtgactgacttctctgcagagtagtgaggatcacatcccctggggacaggcctttggggaggctccacaaatgtcttctcaggaggaagtcttttgncctacatgaagtatatactag

SEQ ID NO: 169 - DNA, 689 bp, Homo sapiens
  misc_feature (619): n equals a,t,g, or c
  misc_feature (638): n equals a,t,g, or c
  misc_feature (659): n equals a,t,g, or c
  misc_feature (679): n equals a,t,g, or c
agcctcaaacacttgtcatttctttgtcgtggggacatctaaaatcctttcctctagctatagtcaagagccacataataatgacatttagtcaaggatggaccacatatgacagtcatcctataatattataatggagctgaaaaaaattcctgtcacctggtgaggtcttaaagatcctgaccctgtgtaggcctaagctaatgtatgtgtttgtgttttagttattaaaagaaaaaaaaatgtttaggccgtgtgctgtggctcatgcctgtaatcctagcactttgggaggtcaaggcaggtggatcacttgaggtcaggagttcaagaccagcctggccaacatggtgaaactccatttctactaaaaatacaaaaattagccgggggtgggggcgcatgcctataatcccagctacctgggaggctgaggcaggagaatcgctggaaccagggaggcagaggctgcagtgaggcgagatcatgccactgcactccagcctgggcaacagagtgagactcagtctcaaaaaaaaaaaaaaaaaaaaaactcgagggggggcccggtacccaattcgccctatagtgagtcgtattacaattcactggccgtcgntttaaaaacgtcgtgactnggaaaaacctggcgttacccnacttaatcgccttgcagcanattccccctt

SEQ ID NO: 170 - DNA, 501 bp, Homo sapiens
  misc_feature (296): n equals a,t,g, or c
  misc_feature (322): n equals a,t,g, or c
  misc_feature (344): n equals a,t,g, or c
  misc_feature (375): n equals a,t,g, or c
ggcacgaggcagacgccagccaccacaactggctaatttttgtatttttagtagagacggggtttcaccacgttggccaggctggtcttgaactcctgacctcgtgattyatccacctcagcctcccgaagtgctaggattacaggtgtgaaccactacgcctggccccttattgttattatctttcatctatacctttaagtaaagtggaacaggttaaagttcgtggcataatracacttcattgaatgcacaatagtatttaacatgttaaaaatattggattaaaaatattnaaccacacatgaaccttaacattttnaaaaatacactgggttttattnttacaaaagtacaattagtacaataatatantatttgttttccattaatttttaaataaatttaaaatgttctcacaaggcaaatttttacttggacacctacccatggcttatttcattttaatttaccctaaggggctcttcacttattttttcc

SEQ ID NO: 171 - DNA, 551 bp, Homo sapiens
  misc_feature (32): n equals a,t,g, or c
  misc_feature (39): n equals a,t,g, or c
  misc_feature (79): n equals a,t,g, or c
  misc_feature (91): n equals a,t,g, or c
  misc_feature (517): n equals a,t,g, or c
  misc_feature (521): n equals a,t,g, or c
  misc_feature (533): n equals a,t,g, or c
ctgccttcaaccttcccaaaaatccagataantgaaaanacccctgtcaaccttaacctttgaaactataaacggggtncactgtctgcantgatgggctccagcacccagcgtctggagctgccctcccttttcagaagagacctggatccggcttggatgatggagggaaaagggctggctcagggggaaggctgatagccaactcagatgcacggacagaaaatctgaggggacccaggaggctgcggtaacggcgctggagttctaggaagtcacagatggggctacaggaagacagcaagggaatccagactgagcaaagactaaaacattcgaaatraaaccatcaaagatttgaaaaaatgggcgawttttttttcagtctgagaacttttgaagtaaggcacctctcaaggaagctagatcagatctgaccactttaatttacaaactctagatgggcaaaagtccaaactggggaaagggaaaaaggaaaacactttttaacacatgncagngaattgggtccntgcccttaatattaaggg

SEQ ID NO: 172 - DNA, 551 bp, Homo sapiens
ggctgcaggaattcggcacgagatttccataaaaaaataggtggcctggctatggtattatagcatacaattaggacactatgcccctgcaaaattttgtaaatcaaattcagaggcaaaaacatattttagaatcatacagtttgcacacgacaagtaggtaataactgtctctaaaaatgttttctccttagtccgcaatgrgctaagattcagaatagtgtcaacagcatgctcctatatgaagttgttttttttaaagcacatttgtttatgacaagcctacattctcagtgaatatggcatttagtatttcttttgaaaacaaacttaagcatcatgagcccaaagttgcactttgactcccaactacggtagcattatggacatctcacaatgtcaagggtttctgttawgtattagtaaagtatagattattggggcctacataatttaaaagaaatgtaaattaatattaaaagcttgtaaaaatatgtatatctttactatttctcaataaatacctttgcaattgttttccatttccttca

SEQ ID NO: 173 - DNA, 357 bp, Homo sapiens
aagaagagtaggcttgtgaaacattcacatgcattgttttaacaaacaatgcttccccagacctccccacagagttgacgctctggaaagaaaagccaggcttttctctgaggttttgcatctccttggccaatgtgctcatgccagagaagagcagtgcatggccagtttgaggagcacggccatgtgaccttggacagcccctgcctctctctaggrctcactcccggtccctaacctcagctctctgatctgtaccacaaggagctgccactaacacctgtgtcagaactactgtaaggaccctttcctcctgctagaggagaacagtgctaaacctgtctgaacgtgatagac

SEQ ID NO: 174 - DNA, 335 bp, Homo sapiens
  misc_feature (10): n equals a,t,g, or c
  misc_feature (271): n equals a,t,g, or c
gcgttttccnctggagccagcaatgtgtcagtaacttgtctatgaaagaacctgaggtgtagccacatgtccagctgccttctgcgcacgcctggcctccctccaggctaccccttctatgggtgcgcatggtgctgctgttggttctggcggggcctccactctgatggttccaccctgggaaagctggccttccatcctgccaaaccagatgacstcagtcccaccacctccaggaagcctctgtagatcttcattctgggttcttgtncattaaaaatacccaccatggcctgggcacagtggctcatgcctgtaatcacagcactttgggg

SEQ ID NO: 175 - DNA, 390 bp, Homo sapiens
  misc_feature (389): n equals a,t,g, or c
agaccctgatccccyggatggycgtagtgagacagtgtatcactagtgcctaaatcatgccagaaagggacatcaacagctataacaggctgaggggttgggaatggagctggccttaatttgaagagaacaaaaggtgaaagtggactttggttctctccactgcaaacccattacctctgtggaagaggactgagaaccagaggtaggaaagtggatgtggagggtggcagtatagaaaggtccacatgtacatatgtgtgaaaatatttagaattcaaatacaggtgaaatattcgtaaatatgtacatatttatatatcatggtacctaccatatataagggggagtgttttgttaatgcttatacaataaatatttagaaaaanc

SEQ ID NO: 176 - DNA, 426 bp, Homo sapiens
actgagtttattcagaaggttacgttctcagcctttattccagggcccaattttcaagacaagccttcgcgggacaggaggagtcctctgaagatagcagtgcatgagcagagaaacacacatggcttggtctcgccgcccagcagctgattccgaggaggggctgagaggggccaatttcacccttccctagcaagactcggaggaggttcttcctacacaagaagcccatctgaccaccagggcttcctggcagagagtkgtkctagatgtcagccaggractccccagaccaggkattcttccaggctcaggcataaagaaccaggaggcttttattttctattaatcaacctagttggaagcagagccattgtaaaggcagagaggtattgattacaggmttaaagaaggaaaacgctgctt

SEQ ID NO: 177 - DNA, 160 bp, Homo sapiens
  misc_feature (5): n equals a,t,g, or c
ggcanagagcggttgagcaggcagggcgcagtggctcacgcctgtaatcccagcactttgggagaccaaggcgggccgatcacggggtcaggagatggagaccatcctggctaacaggtgaaccgcgtctttactaaacatacaaaaaaaaaaaaaaaaa

SEQ ID NO: 178 - DNA, 150 bp, Homo sapiens
  misc_feature (146): n equals a,t,g, or c
atcttcagtccctcagactacaccatcagccccatgggggtgagcaaataacaagtaactatactgttccctgctatgtgtctggctcttggtaaaatttaaaaaagttaaaaaaaaaaaaaaaaacctsggggggggcccsggwnccca

SEQ ID NO: 179 - DNA, 247 bp, Homo sapiens
  misc_feature (175): n equals a,t,g, or c
  misc_feature (198): n equals a,t,g, or c
cagctgcacggagcctggatgggaaagtgcatcctctgggctgacacggtgaactccgtctgtaccaaaaatacaaaagaattggccggatgtggtggcgggcgcctgtggtcccagctactcgggaggctgaggcaggagaatggcgtgcacccgtgaaggcggacttgcagtnagccgagatggtgctgctgcatnccagcctgggctacagagcaagactctgtctcaaaaaaaaaaaaaaaaa

SEQ ID NO: 180 - DNA, 399 bp, Homo sapiens
  misc_feature (175): n equals a,t,g, or c
  misc_feature (356): n equals a,t,g, or c
ggcagagcagagagttcccaccgcattagaaaacactgcatcaccttgagcaagattggcttttgtcttcacatctctaacatgaggagtttggtctacaaagtgctgtgaacatttctgttgcctgcagaaacctttcttcagaggcaatctctatgtgaaaggtcccaatggntgtaaggccctatgtttgagaaggggaagggcagagaagggaggagatgaggtgtctggggttgggtgtgcttggcctcctcttcatcctctgtctcattctttaagattctttcaaggcagtcttcagaatcttcataaggacaaggttttgaggctgggcggttgtggactccatgccngttattcccagcactttggggaggcaaaagttgaggcagattg

SEQ ID NO: 181 - DNA, 386 bp, Homo sapiens
  misc_feature (8): n equals a,t,g, or c
  misc_feature (264): n equals a,t,g, or c
  misc_feature (283): n equals a,t,g, or c
  misc_feature (345): n equals a,t,g, or c
ggcagagnaagagggaagatttatgtacatctattttttaaaatactaccagagggatatataagaaattggtaacaggctgggcatggtggctcacgcctgtaatcccaacactgggaggccaaagtggacaaattgctagagcccaggagttcaagactagtgtgggcaacaggcaaagcactgtctctagaaaaaatacaaaaaattagccaggtgtggtggtgcacacttctwgtcccagctactcagagggctgaggtnggaggatcacctgttcccnggaggttgagactgcagtaagccatgattgtgccactgcattccagcctgggcaacagagtnaggactatttctgggaaaaaaaaaaaaaaagggccccggtt

SEQ ID NO: 182 - DNA, 372 bp, Homo sapiens
  misc_feature (336): n equals a,t,g, or c
ggcagaggtagctgtggtccctgcaaagccaagagcactctgaggaaacatcagtacctggggaggcagtgtgtggtacccagcggagtgtgtaatgggtgatgggcatgggcggaacactcacacagaagtggcagcgtgccacaggggtgctgcaggggtggccatgcctggggaaacgcgactkcctggtttgtcagtgggccctgtaggacagcagttaggcacctcccaggcagctctgcaagtgggcactccaaaggggagcttgagaatagaggagggaaaaatgggaattccttgagtcataatttggtagagctttagaaggggttnaagtcctaagttggggaacatgagcctagaaatatt

SEQ ID NO: 183 - DNA, 249 bp, Homo sapiens
  misc_feature (182): n equals a,t,g, or c
  misc_feature (225): n equals a,t,g, or c
ggcagaggttagccaagtgtggtggtctacctgtaatcttagctacttgggaggctgaggttggaggattgcttgagcacagaagtttgaggctgcagtgagctatgattgtgccattgtactccaatctgggtgacagagtgagaccctgactcttaaaaaaaaaaaattctgttgtttanaagccacccagtttatgacttttggtatagcagcttgaatganctaagtaggtatgtttttctaagt

SEQ ID NO: 184 - DNA, 317 bp, Homo sapiens
  misc_feature (239): n equals a,t,g, or c
ggcagaggcgctttgtgttttaaatagttggtgttttttagacttattttctttctttctttcttttctttcccttctttcttcttttccttccttccttctttcctttcttttttttctttcctttctttgttctttcactcttgttgcccgggctggagtgcaatggcagattctcagctcactgcaacctccgcctcccggctcaggagaatggcctgaacccgggaggcggagtntgcagtgagccacgattgtgcccactgcaccccacaatgggggacagaaggcggagactccgtttcaaaaaaaaaaaa

SEQ ID NO: 185 - DNA, 230 bp, Homo sapiens
atttttttcttaaagaccagtgtgcttttcttggagaaagaagaaaagaagaaagaaggaagaagaagaagaaagaaaggaggaagaaggaagaagaagagccagtgtgataatacattgagtgattttttaaaaagtgcatatatgagcaaaaagttatttttcccttttctgaagtatggcagcatactatatagactgtctctgcatgtttatttttccccccattt

SEQ ID NO: 186 - DNA, 422 bp, Homo sapiens
ttcaaagcagattcgttaagagtgtggggagtttttgttttgttttattttaagctgcattaaactccaatgtatatgaaaggggcatttttataattgtaagttataatgtaaaacttttcctaatgtaaagttagtcaagggtacaatgaggtgttttaaccagaaaatcgtaatcagaatattctagattgccattgtagtcgttcagtgtttcaacatctgaataaattctgtgtcattgtttagctgtcacagtgtgaaaaacgttttgattcacaaagacaagtacytaaaaagaggtaacagtttttgaacagcttaccttgcacactctgaaataatgttcatttaaattggttacagcctgtagttccagctacctgggaggctgaggcaggagaaattgcctggaacccagg

SEQ ID NO: 187 - DNA, 347 bp, Homo sapiens
  misc_feature (299): n equals a,t,g, or c
aaaaaaaaagaaggggggattctctagtagccctaattctacccatctggctactaattcaaactttcttccttcacatctgtttgtggacttctccaatataactagtatgcctgggctcattctgcttcttctcttctggaatagtttatttcatgaccatgtgcagagggggtgatggggcaagcctcacaagccccggaggtctgtggctgaggtgtaccttggctttgttgcctggaactgctctgactctgctcttcgctctttcctggggctgtgtcactacaggctctganctcctttccaccttgggaagtttaggcttcctaaaaaaagaataaatt

SEQ ID NO: 188 - DNA, 519 bp, Homo sapiens
  misc_feature (424): n equals a,t,g, or c
gaatgaattgggggataaagggattagattccaggagtaatgagttagatgcaaaggtaaagaaattagttgataatgattgggaactcaaagacaatgtaactgtctagttagagtggtgggtctttttgctagaaatctgaagttctgtttcacacctgagcccagccacccaagcagaaatcctaactgcctggagcagtatagtgcttctatattctgttgcagtctctatgaaagctccggtaccaaaggagtccagctgactcatatcaagtgataagaaattcatctttgcaaaactggaagcaactcaaatgaaaatgattgcagtacattcactggagtgaatagataattaagactatataactccgtggaaccaggtttttcttctcatttaggttaatcactgggattttgnataacatggcatctgaaactgcaatgctttcttaaaaatagtcttaagattccccactatttggtatcatcatagcaagcatatgtactaacatt

SEQ ID NO: 189 - DNA, 285 bp, Homo sapiens
agcttccatattattttaaacaacctcctcccagtttttctaatctgattactttgaagcaaatcttggtatagttacttttaaataggaagcagataggcacctttccagaatctatagaacttttccttagaatggcagggcatgagtttgtcagaagccccagatggggtcttcatttcaatcaggtgttatgcttggcaacggtttccctgtggggaactttgagggacttgggaagcattgttatctgtttttgtagcgccatctgcgttaaaaaaaaaa

SEQ ID NO: 190 - DNA, 504 bp, Homo sapiens
  misc_feature (442): n equals a,t,g, or c
  misc_feature (446): n equals a,t,g, or c
aaccctcactaaagggaacaaaagctggagctccccgcggtggcggccgctctagaactagtggatcccccgggctgcaggaattcggcacgagcagaagttgatgcactgagaagaaaaggccctctgatcacagatcagagcttgtgaattattattattttttttatctctggtaacaagctgatagggtgagtgagaaggatcaaagagacatactttgatttatcactgagtaataatcctttcccaagaaagacaagttaattactttttgtcttagacccagttagggtcaccttacagtgcaggtggaaagaaagcaggactgctgagaggagctcaggacccattttccaggactattgccttctcaaaactttggagagcagtgaaaatagattcccaagtgaaagaggtggcagaaataaaaccaccaaanaaanctcgagggggggcccggtacccaattcgccctatagtgagtcgtattacaattcactg

SEQ ID NO: 191 - DNA, 88 bp, Homo sapiens
aggaaaaagtcaagattttctgaccacaatgtactacaatttgaaattagttaacaaaaagataactccttaaaaaaaaaaaaaaaaa

SEQ ID NO: 192 - DNA, 371 bp, Homo sapiens
cattgaacacctgccgtttggtcaagcatttctaggcactggagattcaaagtattcacatattccttttctttatagactagcamgaktgaagattcatgtactcattcactcaacaaatatttgccaatcactactaaggttgccagacactattttagtgcttgggatgtatcagtaaacagaagagagagagaaaacaaatacccttccctgttggagctttcattctaatataaggagaaagatgataaatgtaagagaattatgtaatatgttagaaggcatatggggaaaaaaaaatacaccagggtaaggggtatgaggaaaactggaggaagggggtttgcaatttttttttaagagggaat

SEQ ID NO: 193 - DNA, 499 bp, Homo sapiens
gaattcggcacgagggcctctcaaagtggtggggttacaggcgtgagccactgcacctggcctctagtttgcatttctctaatggctaatgttgttgaacatcttttatgtatttatctgtcacctgtattatctcttcaatgaaatgtctgttcatgtcttttgtatattttctaattgggtttattattattatttactctggagtcttgagagagttctttatgtattctagatattagtcatttgttgaatgcgtggtttgcaaataattctctcagtctatagcttgtcttttcatcttcctaatagagtcttcacagagcgaatgttttaaaattgatgaggtcctatttattattatttatttattatataaaaaaagacagagttttactcttgtwgcctaagcgggagtgcaaggcatgatctcggctcactgcaacctccgcctcctgggttcaagcgatcttctgcctcagcctcctgagtagctggg

SEQ ID NO: 194 - DNA, 385 bp, Homo sapiens
  misc_feature (336): n equals a,t,g, or c
  misc_feature (366): n equals a,t,g, or c
  misc_feature (372): n equals a,t,g, or c
gctgaagaagcggaggatcatggacgcatccccgaccctgatgattttktgccgcctgtgcctcccccttcctattttgccacgttttactcgtgcacaccccggatgaaccgcagatggttggtcctgatgttattcccctgccacacatctacggagctcgaatcaaaggtgtggaagtgttctgtcctctggatcccccgccgccatatgaagctgtggtgagccagatggaccaggagcagggatcttcattccaaatgtcagaaggatcagaagctgctgtgatcccattggatctgggctgcacacaagtgactcaagatggggacattnctaacataccttgccgaagaaaattgcatncacctnaacttcccagttt

SEQ ID NO: 195 - DNA, 512 bp, Homo sapiens
aacaaggctacaggctgggagtcactgccgaagtgataagctgtgggtggtgaatgcagagaaggccacaagagtgaaactccatctcaaaaaaaaaaaaaaaaaaagttgtattagaatctggccacacccctttgtgtgtgtattacttagaattgctttagcaacctccatactataacttcaaagtggagtagtggcacagagaccatatggcctgcagaatggaaaatgtcacctgtttggcctcttaccagaaaaatttgccaaccgctcaactagggtgtgatggagaatcccaaggtgtcccttccctcccaaagccactcagggaatcatctgtacccttgtggcctgcattttaacaaacatatacacaaacacattttttaaatttgctagaaatcttccctcccattttcaagtgtggttaatcaattgaccaaaacccagttttctttctttctttctttctttttttgggtgacagagcaagatcttctgtctcgraa

SEQ ID NO: 196 - DNA, 455 bp, Homo sapiens
  misc_feature (434): n equals a,t,g, or c
gaattcggcacgagcagggctggtctgcaatagggcctcagtggctgcttggtgaaagggtagagagggactcagaaatgtatagtgttgggtggaaggggctgccttgtatccagagcccaaagctaatcaccaaaggctgctcagtgcaagctgtttctcaggtacgagcgcactgattgtcacgatcagccctgagaagtggcaaggcagctagtcctcccctcacttcataagcagggagatggggctcaggaggctggcttctcctctcagaacagtggaggcaggactccaagtccaaggggctttccaaatagccagagggttgtgtggcagtctytctgggccctttggtgctgcctcctckacagctctggctcggggtggyactgggtgttaggagttggttattgacttggaagctgtctgtnggacagtgagactgggagagc

SEQ ID NO: 197 - DNA, 346 bp, Homo sapiens
ataaataatattatttggcacattgccaagctaattattatgctaaccattttagaaggtcatcacatttgatccccttcaacaaacttatcaattaggtgctactaataaccaaattatatagataaagaaactgaggtctcaaaagactaagtaacctgtccaacaggtgacacacatgttaagtggcagaaatggagtttgaaccatgtgttatggctctagggctcaagctcttamcactatcccaagtagggtgggaaaggacaatttgcctcactcttactcagtttcctagtcttgtcctttaaaactgtcctctcaagaaaaaaaaaaaaagtcgacc

SEQ ID NO: 198 - DNA, 433 bp, Homo sapiens
  misc_feature (42): n equals a,t,g, or c
  misc_feature (427): n equals a,t,g, or c
  misc_feature (431): n equals a,t,g, or c
tgttgaacctccaccatggggcctctcccacccggggcccantgcatcacccccaccagaaccacgggaggcctccagttgggattttagtgtattaaaccaaggacttttttttaaacttagagaaaacaagaagacgtgacaacaccagaaacaagaacagctctctggccagcctgtgctgaccagtacacagtgaatcacacacagaaaagtatgtcattccggtcagtgtctagctccaccgcctagaaaacagactgcaaataaataaagcgcatgggagaccccgtcacggcagcaagggccccatctggggagagaagaggtgggggaggggaggtgggagaagcagcaggcggggctaccacttcagggcagcaggggtgaaaaagcaggggacagggagcagatgcttgagggcttnggcntg

SEQ ID NO: 199 - DNA, 425 bp, Homo sapiens
  misc_feature (309): n equals a,t,g, or c
  misc_feature (382): n equals a,t,g, or c
  misc_feature (407): n equals a,t,g, or c
aaaggctggttcgttgagtctttcatcgttgagtgataccacctctgcagatggctcagtggggcagccccgtaccacagcctgcccttgaggttgtgtagtttagataggtcacagagttgctgggcctaccgcaggwykcctgaccctggtgcagttttacttcaattacaaccaccaaaatagctacagtcaaaaattccaaagttcctacaccatcaacctccaccccacttccgtccaaagtccacttagaggctctcagttttggaccttagaaacacttagggagctttttaaaaagatcgnttctgtatttttagtagagatggggtttcacccagcttacttcaggaggctgaggccaggagaattcacttgnaaccgggggagttggaagtttgcantgagcccgagatttatgt

SEQ ID NO: 200 - DNA, 387 bp, Homo sapiens
  misc_feature (327): n equals a,t,g, or c
  misc_feature (348): n equals a,t,g, or c
agttgaaacgctctcccctccctgcctcccaggmaatgcccactctgcctccaaagttcatccatcgtcctctcctcaggaagatttccctggtggcttgactaggtcacagtccccctttatttgccgtcttctcactggggcctctccttcctggtagcttctaaacaaggcagtttcatgtgtgtatctccactagactagacgctctctgagggcagggaccctgctttcgcttctggcccgaggtggctgcagggtctgcaagatcatcagggccccctccaatgtgacattgcagaggggaccctgggcctggggcaacgntgggttaattgggtaacaatncttggcccaggggtttcacagcccctttaaaggcagggt

SEQ ID NO: 201 - DNA, 445 bp, Homo sapiens
  misc_feature (194): n equals a,t,g, or c
  misc_feature (276): n equals a,t,g, or c
  misc_feature (286): n equals a,t,g, or c
ttagttcaaaattatattttctaacaaaaactgcattttgagaagataagctaattttactcagtagtaagtcaaatgaggaagtgcagagggtttttttacatatatatagcaaccttgtcaagtggtcctcacaagagtcataaatactttgtaattagcacagtatattcagcagtgtataactctacaantagtaccttatattagtgtagtattatatcatatcttakgtataattcttatattaataccttatgcataattggattcaancattgaaggnctattttagtgttcttcaaaatgtgcttccctgacctactgaaatagaaacttggtgatgaagttcaagaatttgtattctaatcatctcaaacaattcctaaagacactgattttaaaatatctagtctaggccccattgtgtaatagttagcactct

SEQ ID NO: 202 - DNA, 508 bp, Homo sapiens
  misc_feature (470): n equals a,t,g, or c
actctacactctcctcccgtacaccacagcaaacagctcggaccccctgacagctcctggccttccccagctgagtggaaggcttctccagggcttacttcagttcttcgtggattttgcccagtcgcccggagctgcagttccaccaggcaaagcaaacatgcttgtttgttctattaagaaatggctggttaatctttggacctaagtgcaatgttrgacgtggctgacgttcattgcttgaggaggtatgtgttattgaaatgacccagaaggctgcatttggcagtttcccttacttctgacccaagcctcatgcagggctgtgtgggtgctgcctgcagccttytgcaaaagatggaaaaatggcaggaggcacgaaagaccaccaggaaagccgagcgagctcctcaggcttgttccatcaggtctgggaagtcagtaagccatgggaatgagatcccagcaantcttgggtccttccagctctgccgaattcctgcagccc

SEQ ID NO: 203 - DNA, 383 bp, Homo sapiens
  misc_feature (23): n equals a,t,g, or c
  misc_feature (262): n equals a,t,g, or c
  misc_feature (267): n equals a,t,g, or c
  misc_feature (373): n equals a,t,g, or c
cacggacgctgggctgttggcantgtttttttttttcctttttttttcccaaaacacttcactgccacgtgtctctcaggggggaaggtttttactgctacgtcaagggctgtgtctgttccggatcccacgacgtccggctaggtgactcggccatgggtcggaagtcgctcccggagccctcctccgtgtgctccatggaggacatgtgccgcagccgaagccctcaggcagctcccgcacacctccagcagggtcacgntcctntcaaaggtacctgaggcagcatcaatcactgtggaaactccccttcgatcagagactggacgggatgaccctggcatgctgacggggtcagagcggactggctggntcctgagact

SEQ ID NO: 204 - DNA, 410 bp, Homo sapiens
aattcggcacgagaaaatattgtcaattgtaaattataaaatgtacaaacgtaggactgactgaaaatactgcaaaaaaaatcaatgtttttatcagtggagcagtaagtaattgatatatggcaaatgatataaaatctggtgctttcaataaaaccataatgatgtaattatattatgcactagacatagccaaagtttctcttatttttaattattgtgatagaaatttactcttgtgtaaattgctgtatacctgtgtcactgatgaggaaattctaattatcttggaatagttttgaaaaatgggaatgtttctgggagaaaaaataaattgctcttttggcagttggattagtggtgaaagagtgttataacccaaaaaattccataaaggtaccagctattgt

SEQ ID NO: 205 - DNA, 79 bp, Homo sapiens
acccacgcgtccgatttatcagaataccagtgactataataaacttgccagtgtacttgatgaattccaaatgaaaaaa

SEQ ID NO: 206 - DNA, 428 bp, Homo sapiens
cctgctgttcagaacactgcccgacgtccccagagctagccactcctccttcccacccacscgcmgcactctcgaggtcgcaacggcagtcaccaggtcccggggcctgcgttcagctgcttgatccgactaggtttggcttcggacccgaatgggtcagctccacgcccgatggagtttttcaagctggtgcctgcacgtgmccccgccgcggggcatgaagccgtgggctgcgcccaaactgcctcacaaccaccgctgacccgaagcctctctcactccgtccactgttagaaacctgaagctgccctctgtgagaaagcgttgggattgaatccagacttttggggaaccttaacaataaagaatacaaaatattgactaaaaattggatttgaaagtgaraaaaaaaaaaaaaaaaaaacatt

SEQ ID NO: 207 - DNA, 429 bp, Homo sapiens
  misc_feature (339): n equals a,t,g, or c
  misc_feature (367): n equals a,t,g, or c
  misc_feature (388): n equals a,t,g, or c
  misc_feature (415): n equals a,t,g, or c
agagaacccaggtggacattctttccagccaaagactcaatacttctggaaagattaaggtcacatttgtttcaagagtgtccagtacaacaaagaccttccacagggagtagtaactattcctgatagggaacctccaaactgcaataggctttacccttttttatctttcctctttcttcgtgcctcaagtcagatcatagcaagaagaaaccttggaaaatcccctcttctcctccacacctcccagagatgcccaaaaagcagtttaatgctttttcgtagacttagaaaacagttctgttcttcctgggctcagagaagctcccattttggagncttatcttcaaacctgccaggacagcanggtgattcacatggtacttangtgattagacttataatcagagacgcnaagagtaatccagg

SEQ ID NO: 208 - DNA, 503 bp, Homo sapiens
  misc_feature (410): n equals a,t,g, or c
  misc_feature (462): n equals a,t,g, or c
  misc_feature (476): n equals a,t,g, or c
  misc_feature (487): n equals a,t,g, or c
atcttcacactgcmaaaacaaaactcctactcagaattcagtgttaacatacggtcgggattggggttcagtgcctaaaatgcagcaggaggaagatcttgggagtcctgctttctgtcgcgccgggactctggcatcactggatggcaaaccggctccatgggcgaatagtcagcaaaatgccgcagctgcttmctggtgttcgmcctttcccccactccccgtttcctcctttccattccggtgataaaccatgagagaagcagcatctgcgagccagaagatagggttaaatatgatccgaatccctctttcctggctcctgggacagtctaggaataacgggcactgcgacccgctgtaaggttgcgaggtcactccaggcttgcccgagcctctgctcaggtttncaatgacgcgattggggataagcagcgccctcccctcccggcccccatggtncttcctggaaagtngggtttttctncttccccttttcggtt

SEQ ID NO: 209 - DNA, 654 bp, Homo sapiens
tacccacgcgttccgcttgaactgaggtggtggcatttagcaggcattgctggttagaggagggtgtcgctaatggggccacacttgggccaaactaaaaatcttgaggacaagggatactgtctataagttgtggccacgctgacattagaagaaattagttccatattcccagaccctgaatactgcatggttaaatcaaggcaggtgggcaaaaaattacagaagtccttgcttggtggttccactgggctggggctgtaggcacttttgtaggaattgtagtcaggtccaggcaccatgcggttgggcagaaacagagcagcagcttgagaagtttccaacatctccctttctttatattctctctccagcataatgttctccaactctttatcagcaaaggctcttcttttcctcatcctgtcactaactgggggaggtagagggaaggtccctcctacataagtctccgctggaatgggctgatagcctacaagaagcaaagattgcacatgaaagagattaacatctacggaataaaaatgtggaaacccagaaggtaacagcaacactacagatcagcagaacaattatttacagttccatctcactgatatttttatacagatgcaaaagtacagattaggttct

SEQ ID NO: 210 - DNA, 1339 bp, Homo sapiens
  misc_feature (34): n equals a,t,g, or c
  misc_feature (718): n equals a,t,g, or c
  misc_feature (835): n equals a,t,g, or c
  misc_feature (926): n equals a,t,g, or c
gccgcgcctgtcatttccatatcgcctgtgcccngttctctgctgcagtggcagagctcagtagctgccaccgagaccagctggcccaagaagccgaaaatactaactctctggcccttcccacttcaaagcatcattcataaaacttcagtgtgatgtaggagaagataatcacgtcacactcatggcaagaaaaaatactcagatccaagtagactagcagcaaccaaacatgctgatgtgtgggggctgttttctgtattttcttcagtggtctggcagttgtcccattttctagatgagaaaactgatcctcagaaaggtctccaggtgagtaatcagcgaggccagcattcaccattgactgcctcccttacagaaaaggataataacaacatttcagtttagtatgacctgatcctgtaggtggctttactgcaactgagagttgaactgaaggatctgcatttctttctttgacatctgaaaataaaggaaataaaactactgatattgaaagtaataaaaaatgaaaatgaaatgattkttactgtcagttttttttgttttgttttgttttgttttttcacagagtcttgctgtgtcacccaggctggagtgcagtggcatggtctctgctcaccgcaagctccacctcccgggattcacgccatctcctgcctcagcctcccgagtggctgagactacaagcgcccgncaccatgcctgggctaatgttgtttttgtatttttagtagacatggggtttcaccgtgttagcctggatgktctcgatctcccgacctcgtgatccgcccgcctcggcctcccaaantgctgggattacaggcgtgagccaccatgcctggcccggttgttgtagtataaagtgcatgtcagtggcatgaagtggatgtgtaattctncccctagcaccctcccagtgaggcaagccggcattgccattaagctgtttctgtggtttttctagcacgacttttatggtatggcaagtctcaaaaaaagaacttgtcgggaaaccatttctgaccattgctttctgcttaattaaccagtattagcaagaatgtaaaaggacagatcaggtgaactatcttaacaaataccaaaagtaaatgtctctatatggagggtaagatgtagacaaactcagacacaataaagaaatttaaagaggggagtgggcagggcacagtggctcatgcctgtaatcccagcactttgggasactgaggtgggtggattggataaggctgggagtttgagaccagcctaggcaagatagtgagacccccatctctgaaaaaaaaaaaaaaaa

SEQ ID NO: 211 - DNA, 526 bp, Homo sapiens
  misc_feature (8): n equals a,t,g, or c
  misc_feature (15): n equals a,t,g, or c
  misc_feature (23): n equals a,t,g, or c
  misc_feature (55): n equals a,t,g, or c
  misc_feature (415): n equals a,t,g, or c
tcggacgnacgtacnggggaaanctggtacgcctgcaggtaccgggtccggaatnccgggtcgacccacgcgtccgcagcccaccgcccccacccaaagtgacatttgcttatgtgactctgactcacattatagttagaggaccgtgggttccaaaggtggttctcagccctgactggtcagtcaccagagtctcctctcagtgatcattcagtctatgcataaacacttccagtgacaggaagctctcagcctcccacagaggctcacgccaactttggaaatgctcctacacttaaatggttgttggatttgtttataaacctaccttcttgcaactttcacccacccatgctgtttctacttctgtggtgaatgatgcctctcacacatgtcagcatatcgggcttscygncattatctcttcacccatagatccttaaaaccaaaagccttttgacgttgctttagaaaggaagtaaatcctaaggagctttgatgttgaagcaccccttagtcaggaaag

SEQ ID NO: 212 - DNA, 427 bp, Homo sapiens
tggtgcctacgcacataaaatttgagcagcactgccctagcatgattctagtgtgcagtcaatgttgaggaccactgtcttagaggattgcgtaaaagcaaatgacgtgtatataaatttagattgtaatattctctgagtataaactcattaggtgcaagctgagctcaccctccatgttttctgtgttcctggttaaagtaagttacctttgatgaaaaccacaggttcatctttgacttcaaatcagatttgttgctattgaagctaattggatcccagctcagctttgtggcttggattcacaccatataaaatcttcaacaagacattcattcctttgttcagaacacacaaccttctaacgtgaacctccaattttctaaattcatctttttctacttcacctgaaaccacagatccatgg

SEQ ID NO: 213 - DNA, 463 bp, Homo sapiens
ggtttctccgaggcgcactgaggctccggggcgagtccgcgcagcgcgagctggggaaagccgtccggggctcccgatgaccctgcactccgccgggaggccgcccttcggaaaagccgtggaaacacacccggattgaaatgcccctggcccgcctgacccgaccctaggagaagcagccgagttacccgacatcgtggtcagcaggagctgggtcggtggctggatgctgcagcagcagggactcagcgcctgggagggctcctggggcagggagagaagcagagatgcaacatttttaaaatttcacaaagcatccggctgcacccaggtccctggaacaggagacaaacagaattaatgttttatacttcgggtataggtttgagttttttccccctcatgccaagtatttaaaacctytagaaacccaaaaaaaaaaaaaaaaaaaaaaaaaaaaaaa

SEQ ID NO: 214 - DNA, 283 bp, Homo sapiens
  misc_feature (65): n equals a,t,g, or c
  misc_feature (141): n equals a,t,g, or c
  misc_feature (275): n equals a,t,g, or c
agcccaacatcagggctggggcgggcagggctggcctggtgaatccacatgggaaagtgtgtgtntggacgtggtgggggccactgggccactgacctgggagatgacaagcttgaaggatgacttaaactcctgcacgtnagttgtcaagcggctcaccagctgccctgtcttattggcgtcaaagaaggtratgtcttgtctggcatgggacaagaaccaataaggagggcagaagagggagacattacttcaggataaggtcctacccccanacccctca

SEQ ID NO: 215 - DNA, 769 bp, Homo sapiens
  misc_feature (6): n equals a,t,g, or c
  misc_feature (13): n equals a,t,g, or c
  misc_feature (25): n equals a,t,g, or c
  misc_feature (38): n equals a,t,g, or c
gcttgnacttctncgggaaaccgcncctatcactctcnaatcctctacagaagatgagtttggtagacctctgcttatctgatttaaattcttcttgctgtaatctcagctgttctggttggtggcaatgggcaaactcaggatgttggtcagacaatggactgaagagtttacttttctctgcttccctgcccaactgtacttgagtaatctttatagtatctctaaaagatggtcctggaatggtgctccctggtccttccctgtctcttgcagtcggccaggacacaggcgggagtatccacagctctcattttacagcttccttcccgttccctacagcaatagagggggagccctaacggggttttagcaatcagtccagccccttcagtctggaaaggaggacactgaggcagggatgggcggtgccttgctccaggccacacaacaaggcagtgacagtggctgcgtttgaacccaggtgtcctaacctccaggacccacacatggcaatctgaggaactgctcggggagcagagtgcttaatgacaggscttcagggacactatttgtcagaggggctttcaaggtaactcctgtggtggtgttgggagggggtgctcagccgatgcctagctctctgtagccttggtggggaggccactgtgacccargtcagcttgcctggaacagctgggtttctggaaacacttctctctttctatggggccctgtcgtgggtggtggtggagaccccggggtttgt

SEQ ID NO: 216 - DNA, 1332 bp, Homo sapiens
  misc_feature (680): n equals a,t,g, or c
  misc_feature (1114): n equals a,t,g, or c
  misc_feature (1173): n equals a,t,g, or c
  misc_feature (1199): n equals a,t,g, or c
  misc_feature (1219): n equals a,t,g, or c
  misc_feature (1269): n equals a,t,g, or c
  misc_feature (1321): n equals a,t,g, or c
ggtaggcagaacctgggagacggtggaagaaatcttcaactcctggtagggaaggacacatagaaaaaggtgaggatggcggtgtggagacagcctgggggagaggccagagtggacagaggctgtggaatcacttaacaaacctttctgggctgggagactcggtgctggggtgtgggcctccagaggggagtaagcagggcagacccacccttcctcataatacatatgcataagctcatttgcataacaacacacctgctcacctggcccccatcgaagtaactggccttgcctcaaatggtccattatttttgactaaagtatggggaaaggggacccattctcttgctcatccttttccttatctcccagattcctgggtttggaagagaaggaggagtaactgtggaatgagtcacagaattattccacctgccccagggccaggccacgagtagagcgaggatagatgtctccctagagccttacctgctgcccctggggaggtctggggcttccacccagaggaagagcaggggtggtctgggcagcccaggagtctgggggaaggaagcaagcacccttactcctcatgatctctgtcctgktaccctwctcagtgcctggggccagggctaggtgtgtgttatctcacctcaaacagtggctctgggctnccctgcccaagctaatgtcatagtggaggctcaggccctgcaccaacatggttccgtagtccctggagtcaggctgggggagcccagggctgaggctccctttcatcccctcccaccaggaaagggtctttctcggtatttcccacaaacactcatatcaccacttgacagccttttcattccattctcccgcctctctcagccccaccacacccctgacacattccttcccccacttcagctcctggatcgcaggcaggggcaccctgcctatcccctctcccaaagcgggtgcctgggagctgacatcttggctcaccttctcctcctttgkcttctcttctttcccccactccccagcatttcatccaagccagaaatgggcctagaagtctgtagaaagacatcccgctgctatcactccacaaatcctntagagaagatgagtttggtaagacctctgctttatcttgatttaaattcttcttgctgnaaatctcagcttggtcttgggttggnggcaatggggcaaaactcangatgttggtcaagacaatgggactggaagaagtttacttttctctgcttncctggccaaactgtacttgagtaatcttataggatctctaaaaaatggtccnggatgggctcc

SEQ ID NO: 217 - DNA, 1112 bp, Homo sapiens
  misc_feature (1020): n equals a,t,g, or c
  misc_feature (1023): n equals a,t,g, or c
  misc_feature (1081): n equals a,t,g, or c
tatcrtgcycatgtmcaattctgttgctttcaattcatcagtccttatatattctgtytakaawwcttcattcacatccacttccatttgtatgactgaatcccaagtccgcacctctcgctttctatccttgtctttctttattcttgtaaatgaggatacagacatgataaagacacatttgcaacctcaagatgttttacaatttgttaggaaatgtagaggataggaacctaagtcagtctagggtggtgagaaaatatgcttaaattgatgttgagagacacatatgagatatgagttaaccttgtcaaaggaaaagacaaagcttctagggagaaaggacagagacagagagagagagagagagattaacacactataacatgcagatacacatacaaaagaggaatgtttgtggagaacacttcaacatactgtgatttgtgtgtgtgtgtgtgtgtgtttggaagagttaaacaattggaaaacagagccagagttcaagagtccggccttgagagttagttatatgatagtaggatttctttatacaaagtgagtatgcatgtggatgaaattgcccaggtagaatgtgtaatgactgaatgagagagggttgaaaagaaacgtctggggaatagacatttcagggagggacagaggagaagcaacacacgggaaaggcaaagaatgagcaactagaaaatcagaagagaaccaggagaggtgtgtatcatagaaactaaggcagaagatggtttcatggtggtagtagtcaatgatgtcagacatggcagaaaatagaattgaaatgaaccagtsctcccatttctggggctatttccgggtgaccaaatttaagaagagtctccacagcttgagggattccagcatgcaggaagatgcccaagatcctcaagacaaaaggggagatacttgktaaggacgacagaaaacccagaagtttccaaatgccaagaggagaatgagaaagatcatcaagtctgggcaggtcantangagtatatgaaaattcaatttaaagtccttgagaaccaggggaaaatactcatggganctgggaaaccagagtggttatttgaaccagc

SEQ ID NO: 218 - DNA, 763 bp, Homo sapiens
  misc_feature (632): n equals a,t,g, or c
  misc_feature (654): n equals a,t,g, or c
  misc_feature (659): n equals a,t,g, or c
  misc_feature (669): n equals a,t,g, or c
  misc_feature (677): n equals a,t,g, or c
  misc_feature (695): n equals a,t,g, or c
  misc_feature (750): n equals a,t,g, or c
gcagcaataggatactgatacatcctcataactcattccgagtctaaacattaaagataaaagggaaatatgccactggcaatatcttttctttcttattcagacatttgattcttccagtcttaatcctcgtcccacatgcctctggcacatctacttgagcacatttattctttatctgattatcctactccaatttccataagcaccatcctattcttggcattacacctcctctccaatattttacccagttcttttttgttgttgatgtttaaatacttcctcaaattctcctgcttattttgtcagtgtgaaaccagagtagtaatctctaaaagcctcttgggctgctcttacttttttgacttatgttactcattgagcaagtattttcctgcttctcttttatctgttgttttgtttactagtttgkcagcatcaaatgttttctgkcttaaatccaaagctcactggtaccacatacaaagttcaataatgtattctgcaaacctaacatattatcatgctcatgtacmattctgttgctttcaatcatcagtccttatatatctgtctagaaaacttcattcacatccacttccattggaatgactgaatcccaagtccgnaactctcgctttctatcctggncttcnttaatcctgnaaaggggntacagacatggataaagncaccattggcacctcaagaaggtttacaaattggtaaggaaatgtaggaggatanggacccaaggcag

SEQ ID NO: 219 - DNA, 471 bp, Homo sapiens
tcgagcactgggggatcagagattttaaggttcatttggtgggtcgggtggtgggggcagtaagtcgggagtgctgattggtcaggtcagagatgaaattatagaaattagacgctgtccrctttcgctgagtcasttcctgtgtgaccgccacaacattggatgagccagtttatcgatctgggtggtgccagctgatccatcaagtgcaaggtctgcaaaatatctcaagcactgatcttagtcttacaataaagatgttatccccaggagaaggtcagaatcttgtagcctcctgctgcatgactcctaaactgtaatttttaatcttttagctaatttgttagtcatacaaaggcagtctatccccaaggcaagaagagggtttgttttgggaaagggctgttattgtctttgttttaaactataaactaagttattcccaaagttagttcaacctatacccaggaa

SEQ ID NO: 220 - DNA, 362 bp, Homo sapiens
ggcacgagcagaagttgatgcactgagaagaaaaggccctctgatcacagatcagagcttgtgaattattattattttttttatctctggtaacaagctgatagggtgagtgagaaggatcaaagagacatactttgatttatcactgagtaataatcctttcccaagaaagacaagttaattactttttgtcttagacccagttagggtcaccttacagtgcaggtggaaagaaagcaggactgctgagaggagctcaggacccattttccaggactattgccttctcaaaactttggagagcagtgaaaatagattcccaagtgaaagaggtggcagaaataaaaaaaaaaaaaaaaaaa

SEQ ID NO: 221 - DNA, 1180 bp, Homo sapiens
  misc_feature (4): n equals a,t,g, or c
  misc_feature (1151): n equals a,t,g, or c
tgtntcaaaatttgatgaggtcctatttatttatttattttatttatttattttttttgagacagagttttactcttgttgcctaagcgggagtgcaatggcatgatctcggctcactgcaacctccgcctcctgggttcaagcgattcttctgcctcagcctcctgagtagctgggattacaggcgtgcaccaccacgcccagctaatttttggtatttttagtagagatggggtttcaccatgttagccaggcttgtctcgaactgctgamctcaggtgatccacctgcctcggsctcctaaagtgctgggattacaggcgagagccactgcacccggccattgattttttttctttatagatcattgatgtcaagtctaagaattctgtgcctggtcctarattctgaacattttgccctatwttttctatatgtkttatgattttaggtwttacctttaagtttgcatccattttggattgatgtttatataataattttttttttgagacaaggtctcactgtcacccacgttgcagtgtagtggtgtgatcacagctcactgcagcctcgacctccccaagctcaagtgatcttcctacctcagcctcccaagtagccgggactacaggcgtctgccaccatgcccggctaatttttgtaatttttgtagagatggggttttgtcatgttgcccargctggtctccaacttctgggctcaagtgatctgcctgcctcagtctcccaaagtgctaggattataggcgtgagccactgcacccagcccaaattcaacatcttttcatgataaaaactctacaaaattgagtttggaaagaacatacctcaacataataaaagccacgtatgacagacccacagctagtatcatactacagtattctccagtattttcttctaatgatttttttkttttttttttgagagcgakagtctcgctctgttgcctaagctggagtgcagtggcaatcttggctcactgcaacctctgcttcctgggttcaagtgagcacatctgggtwatttttgtasttttattagacaaggtttcaccatgtattccaggctggtcacaaactcctgggctgaagtgatccacccgcctcggcctctgaaagtgctganattacaggcatgaagcatgctcccgggca

SEQ ID NO: 222 - protein, 110 aa, Homo sapiens
  misc_feature (57): Xaa equals any of the naturally occurring L-amino acids
  misc_feature (91): Xaa equals any of the naturally occurring L-amino acids
  misc_feature (100): Xaa equals any of the naturally occurring L-amino acids
GSTHASGFPNSMFNSDKFQFHRGYEKEKKSTARIQQRRIHFTFVLIKNIFQFMIKSXIILLKTGPNYFQPDTVQTLTFSIKSIPDSYFVKXKAHLASISXVVKIKATGLG

SEQ ID NO: 223 - protein, 40 aa, Homo sapiens
SHSQTDQGPRSRVISNTPHTASKVFSFQLLNYLRKKKIIH

SEQ ID NO: 224 - protein, 62 aa, Homo sapiens
  misc_feature (51): Xaa equals any of the naturally occurring L-amino acids
  misc_feature (52): Xaa equals any of the naturally occurring L-amino acids
  misc_feature (60): Xaa equals any of the naturally occurring L-amino acids
LIPQLRFSPGVSLTCFQCLLWAVSICDSTFPRGRFLPKAGCIYCQSWAVAXXVFEHIIKXTF

SEQ ID NO: 225 - protein, 117 aa, Homo sapiens
  misc_feature (46): Xaa equals any of the naturally occurring L-amino acids
  misc_feature (47): Xaa equals any of the naturally occurring L-amino acids
PTRPAVPTFRRMVALGSPPALLAISKAPPPPPAVSTKPLGGAARDXXGRASNRLTDFRPHYCSSQWEPRRGAEEAGPAGKPGQRREALLPPLRLIPASAASAFPSEPCGRFRGIPSF

SEQ ID NO: 226 - protein, 47 aa, Homo sapiens
AGKSRERSLKLSLMVVIYLPGQHGLQRGHPDAAGSEKTRAEFGTSSF

SEQ ID NO: 227 - protein, 47 aa, Homo sapiens
SSTNMIKYRVYLSTKLEDVHPRDTDSKLMGTAFPKRRSYGFTYMCRD

SEQ ID NO: 228 - protein, 44 aa, Homo sapiens
  misc_feature (40): Xaa equals any of the naturally occurring L-amino acids
RVLRWSKVSHGEGAECANMLAQVFVLLIKPSVPTHYNPLXHELD

SEQ ID NO: 229 - protein, 115 aa, Homo sapiens
  misc_feature (94): Xaa equals any of the naturally occurring L-amino acids
  misc_feature (96): Xaa equals any of the naturally occurring L-amino acids
  misc_feature (106): Xaa equals any of the naturally occurring L-amino acids
FGTSFISLACPLAAYATLCPLAKEAQLRPRSVPAQQSYRRPEAPSCSLLLYRRHAAKRCAGTPPEDPACSSALHTVDGGDPRGQEKLIETSLHXLXQQEVHGHAFXEGYKARCGI

SEQ ID NO: 230 - protein, 78 aa, Homo sapiens
  misc_feature (15): Xaa equals any of the naturally occurring L-amino acids
  misc_feature (40): Xaa equals any of the naturally occurring L-amino acids
  misc_feature (77): Xaa equals any of the naturally occurring L-amino acids
IRHELSYPDALEGSXVRVEPAAFPSSFCETVVSGQSNNKXCSTLKKCGTYRTEVAECHDHGSTFQGRKKGGSSFRDXF

SEQ ID NO: 231 - protein, 34 aa, Homo sapiens
  misc_feature (15): Xaa equals any of the naturally occurring L-amino acids
  misc_feature (20): Xaa equals any of the naturally occurring L-amino acids
VVNEEASICLNGRPXLCSVXPIQQEWYLLEVPQI

SEQ ID NO: 232 - protein, 57 aa, Homo sapiens
  misc_feature (41): Xaa equals any of the naturally occurring L-amino acids
VNCTSATHCFLDTTELFALMEEHCYTNLFIFDPHFKIPVQXIYFLTYGLSGFLINVS

SEQ ID NO: 233 - protein, 74 aa, Homo sapiens
QRLQCHSSTMIASHTGNSVPQNLMVMSLKCLIQSLAHRGYTTIFLSANCLLSSCGFEDCGLGKHLDGTPVKMRN

SEQ ID NO: 234 - protein, 65 aa, Homo sapiens
YSFFTSCKNLTCMRFSEIENHNQDNLSLLQMFYIEYHLASKSVIPFLSVAPDFHNLPLLSRSGNL

SEQ ID NO: 235 - protein, 66 aa, Homo sapiens
  misc_feature (56): Xaa equals any of the naturally occurring L-amino acids
AHLRHTVGSYHMLSACSFPACAQGGFGGVGYAVCPLQIPGCPTSRNLAMQGKAHIXSPASLGSNAV

SEQ ID NO: 236 - protein, 48 aa, Homo sapiens
  misc_feature (25): Xaa equals any of the naturally occurring L-amino acids
  misc_feature (26): Xaa equals any of the naturally occurring L-amino acids
  misc_feature (42): Xaa equals any of the naturally occurring L-amino acids
SRLSFQDLAPALGMVGGKAKNLGSXXPWALKNVVLFKEQGSXQGCFWG

SEQ ID NO: 237 - protein, 83 aa, Homo sapiens
  misc_feature (66): Xaa equals any of the naturally occurring L-amino acids
  misc_feature (81): Xaa equals any of the naturally occurring L-amino acids
KSHPIPAVGILSKKKKSAMNYHMKSNKERRQKASRALFLFCRLCWLQSNRMLESGVFLVGKTIATXLSIKKSVWLKKKKKXKE

SEQ ID NO: 238 - protein, 78 aa, Homo sapiens
  misc_feature (71): Xaa equals any of the naturally occurring L-amino acids
  misc_feature (73): Xaa equals any of the naturally occurring L-amino acids
EGLPERIDLKLHSKEEVLVHICVFHLHEQNGPARWSCSKRGGTCPIARKPSGSFILEGVCNRLGRISFFFXLXALGKS

SEQ ID NO: 239 - protein, 68 aa, Homo sapiens
  misc_feature (60): Xaa equals any of the naturally occurring L-amino acids
  misc_feature (61): Xaa equals any of the naturally occurring L-amino acids
  misc_feature (68): Xaa equals any of the naturally occurring L-amino acids
AQEFETSLGDMVKSCLYKKIQKISQAWWHAPAAPAYLGGLRWEDHLSLGGQGCSELRSDXXFPALVTX

SEQ ID NO: 240 - protein, 71 aa, Homo sapiens
  misc_feature (2): Xaa equals any of the naturally occurring L-amino acids
  misc_feature (4): Xaa equals any of the naturally occurring L-amino acids
CXGXVIHEKKFKASPVCIISPTLLFFSPSSLLKSPARLRFTISPVGSCLVHRKVGPGGRIQGPRAEAFFPI

SEQ ID NO: 241 - protein, 55 aa, Homo sapiens
  misc_feature (15): Xaa equals any of the naturally occurring L-amino acids
FSPPKKKKNPLEVLXSARPMKINPWIIGNLKRFPKWASLRHIQQLCRLIRRNGHS

SEQ ID NO: 242 - protein, 52 aa, Homo sapiens
LESGIRTLWLLIEGRTVLKSRVGRAWWLMPVILALWEAKADGSPEVRSSRAA

SEQ ID NO: 243 - protein, 68 aa, Homo sapiens
  misc_feature (59): Xaa equals any of the naturally occurring L-amino acids
  misc_feature (68): Xaa equals any of the naturally occurring L-amino acids
ALNMTKRNLGKQFLKSKVYSCFVSVWLLIIQQNRLLKTGHSKPEFQDLTLDTSMEAGKXSGAGKGRGX

SEQ ID NO: 244 - protein, 25 aa, Homo sapiens
SLAENVIISMVFFSSNTTCDSRLCH

SEQ ID NO: 245 - protein, 51 aa, Homo sapiens
  misc_feature (24): Xaa equals any of the naturally occurring L-amino acids
GQTQFKAAAPKPGSTLTSLRPSRXHSRAIKSEFLEVKCRHRYFLLKYPRGP

SEQ ID NO: 246 - protein, 81 aa, Homo sapiens
  misc_feature (41): Xaa equals any of the naturally occurring L-amino acids
  misc_feature (67): Xaa equals any of the naturally occurring L-amino acids
  misc_feature (74): Xaa equals any of the naturally occurring L-amino acids
QDIHRVETAALPHPFRPLECHQTTRAAPAGVAHLGNSEDKXPWRLFSGGRWHFPRKGSTQTSESEDXLKRKLFXLYSGMLL

SEQ ID NO: 247 - protein, 49 aa, Homo sapiens
  misc_feature (27): Xaa equals any of the naturally occurring L-amino acids
CFARTLFLFFFRKISFDSKWKAKHTFXPPTLAIGRGPFLLPSYNDSVYV

SEQ ID NO: 248 - protein, 70 aa, Homo sapiens
  misc_feature (51): Xaa equals any of the naturally occurring L-amino acids
NSARALLGLPECWDYRRDTVPGPRSILIDFSHLSIWVIMSCLFSCLFFCFXFFPDIQYFVFYLVWCWIFL

SEQ ID NO: 249 - protein, 57 aa, Homo sapiens
  misc_feature (51): Xaa equals any of the naturally occurring L-amino acids
VFHFLWSDCKIYCLFNFSFHIFIATDQKMKGDCLFVCWTLFPQDLAQLIWXFAFECV

SEQ ID NO: 250 - protein, 43 aa, Homo sapiens
  misc_feature (17): Xaa equals any of the naturally occurring L-amino acids
  misc_feature (31): Xaa equals any of the naturally occurring L-amino acids
  misc_feature (37): Xaa equals any of the naturally occurring L-amino acids
LLLSSFPLGKLSYFSPXLKINPNFNRGPPYXGPFHPXYPYNLY

SEQ ID NO: 251 - protein, 74 aa, Homo sapiens
  misc_feature (72): Xaa equals any of the naturally occurring L-amino acids
RGTCGFYLTFVSVFTVSCEFYNEPVRFAELRVIYPSMVENTGSFRGVKVACLEICVQWVVFLTSVSQSCFAXES

SEQ ID NO: 252 - protein, 49 aa, Homo sapiens
  misc_feature (35): Xaa equals any of the naturally occurring L-amino acids
GNVICTWIKFQNTTCNFLSLEKQHPPLHCCLTIFXLMQFSLTTEGRKTL

SEQ ID NO: 253 - protein, 36 aa, Homo sapiens
MTEKNDTSCCGDLFTRNGVMKCLGKRLQHRIYLGVN

SEQ ID NO: 254 - protein, 84 aa, Homo sapiens
NPISTKKKKTRGGARYPIRPIVSRITIHWPSFYNVVTGKTLALPNLIALQHIPLSPAGVIAKRPDRSPFPTVAQPEWRMANCKR

SEQ ID NO: 255 - protein, 39 aa, Homo sapiens
LGVVARAYESQHFGRLRWADYLRPGVRDQPGQHGEPRLY

SEQ ID NO: 256 - protein, 39 aa, Homo sapiens
SFFKLNERRLSSPDIKTDHKAIIIKMAWHCHRVKSVKNY

SEQ ID NO: 257 - protein, 37 aa, Homo sapiens
GSWDSGGLITCPALQSEFRSHNSDSDLLTPKFLQVLP

SEQ ID NO: 258 - protein, 54 aa, Homo sapiens
  misc_feature (42): Xaa equals any of the naturally occurring L-amino acids
GLKAGRHWMPDDEVDFQTGALLKRWDGQRHRRSVGASSITKXFNEDLGIAWSWS

SEQ ID NO: 259 - protein, 88 aa, Homo sapiens
  misc_feature (86): Xaa equals any of the naturally occurring L-amino acids
YVKLSENKFQRGDCGKPKYAIQSVPLWHILRWLFRGSADTKHGSENLSFCKINLHVYINKANKGCRQTVSLRSFYLNLGKVNSQEXKT

SEQ ID NO: 260 - protein, 49 aa, Homo sapiens
  misc_feature (41): Xaa equals any of the naturally occurring L-amino acids
DQRAQERPLMVTSIGRTMTKYNSLLDTKSPTVRILLHYLGXSLYKSLKI

SEQ ID NO: 261 - protein, 55 aa, Homo sapiens
  misc_feature (46): Xaa equals any of the naturally occurring L-amino acids
GLSHSNSSYLEPLGSDVDRANVKFTENTCVFRTLKGTIRACFPSLXMHIFGISWG

SEQ ID NO: 262 - protein, 66 aa, Homo sapiens
  misc_feature (66): Xaa equals any of the naturally occurring L-amino acids
ASRRLNKLLTVSQLETGEAEFKSTSFSFQSSCSLRHTPWRVVHCEQEGSALFHLSPFFFYLFSRGX

SEQ ID NO: 263 - protein, 57 aa, Homo sapiens
  misc_feature (35): Xaa equals any of the naturally occurring L-amino acids
  misc_feature (45): Xaa equals any of the naturally occurring L-amino acids
  misc_feature (48): Xaa equals any of the naturally occurring L-amino acids
  misc_feature (53): Xaa equals any of the naturally occurring L-amino acids
KIQNLNPNPGLTNLKVCILKRDTLSFCVRRVESIXICRYRVFYGXGLXRGHNXGVKG

SEQ ID NO: 264 - protein, 67 aa, Homo sapiens
EKIYPSLMLLGLAKLCEAQKLRPSLHLLYFKWKVNTVWEESARSISPFVLIGFYFFLLKTGVNYTLH

SEQ ID NO: 265 - protein, 51 aa, Homo sapiens
  misc_feature (26): Xaa equals any of the naturally occurring L-amino acids
FQKIDTVSNFNLDVIVIITVFIYPSXYILSCRQLLFRGMKKKRELVGSLLA

SEQ ID NO: 266 - protein, 59 aa, Homo sapiens
  misc_feature (49): Xaa equals any of the naturally occurring L-amino acids
  misc_feature (50): Xaa equals any of the naturally occurring L-amino acids
PLPDTLPVTVRINLKSLPSPYQPGNHPALATFLLSLSLTLLKLHVTFAXXFFPEHNKLP

SEQ ID NO: 267 - protein, 59 aa, Homo sapiens
  misc_feature (8): Xaa equals any of the naturally occurring L-amino acids
  misc_feature (36): Xaa equals any of the naturally occurring L-amino acids
  misc_feature (53): Xaa equals any of the naturally occurring L-amino acids
LWQEIWKXLKSMREKKWNAHYKRNSSLVGGLCSLFXFFPSYYSLTTPLASQLXLCPKKS

SEQ ID NO: 268 - protein, 37 aa, Homo sapiens
ATWSGARSLGFRIQQAQIQVQLSHVAECCLNLSVLSC

SEQ ID NO: 269 - protein, 77 aa, Homo sapiens
NSARVTAGGEEWVSEQSFICIYSRSPLLALPRVPPPVRLAAAFDFHRNTNPIVNSACKGSRLCTPYENLMPDDLRWS

SEQ ID NO: 270 - protein, 44 aa, Homo sapiens
  misc_feature (40): Xaa equals any of the naturally occurring L-amino acids
  misc_feature (41): Xaa equals any of the naturally occurring L-amino acids
PWPEVYKEILLNIAFCSGKYIHRNRIVYSPAKECYLLSFXXMLS

SEQ ID NO: 271 - protein, 52 aa, Homo sapiens
  misc_feature (2): Xaa equals any of the naturally occurring L-amino acids
  misc_feature (20): Xaa equals any of the naturally occurring L-amino acids
  misc_feature (23): Xaa equals any of the naturally occurring L-amino acids
  misc_feature (34): Xaa equals any of the naturally occurring L-amino acids
  misc_feature (36): Xaa equals any of the naturally occurring L-amino acids
  misc_feature (44): Xaa equals any of the naturally occurring L-amino acids
RXLSTFNSWGSMRKTDIFFXNWXCGAFFVSPKEXPXYQKFTLGXSRVVPLKV

SEQ ID NO: 272 - protein, 77 aa, Homo sapiens
KKKDPEILLLPLEPTPNSSLERNRGTPLIPIPSFTNQQELHAVMTGRKELKACPMILSLVWLLESNFSLGPERMIHI

SEQ ID NO: 273 - protein, 63 aa, Homo sapiens
  misc_feature (15): Xaa equals any of the naturally occurring L-amino acids
NVESYLCFPLTLILXFPVVFGLNVNCIHLLILICVTHTEIILFIEPPVGRCLIVYKYKIVPNT

SEQ ID NO: 274 - protein, 62 aa, Homo sapiens
IRHEKKERMKERKEKKERKEKGKKERKERKERKREKERRKRRKGIPGIYHCMSKGRVVDRHS

SEQ ID NO: 275 - protein, 56 aa, Homo sapiens
  misc_feature (9): Xaa equals any of the naturally occurring L-amino acids
QEFIQILVXSKREVSCTFNWLSTVEFKHNHGQIIQMLEIQQASWYLRLRNQASAEI

SEQ ID NO: 276 - protein, 126 aa, Homo sapiens
  misc_feature (54): Xaa equals any of the naturally occurring L-amino acids
  misc_feature (110): Xaa equals any of the naturally occurring L-amino acids
NPDPQPKFKLVPSPGYNSKKWGCDPENSVPAISVCPLLHSHLVSTGLRCLLLGXQAGLALSHLGPHVSWHSRPGVMQTDFLSLRFFCLEKISPSCDPRGPGLGLRVCVPXCVLKIGPGKEAGRLRN

SEQ ID NO: 277 - protein, 111 aa, Homo sapiens
  misc_feature (99): Xaa equals any of the naturally occurring L-amino acids
SCREGLRHSVSGPYPVEGLCHSVGGPYPISRKLFATAWVGLTQSVEGFLPQRGWALPSQRPLPQRGWALPNQSKAFDTAWVGPCPISRSPSTQRGLGLXPISRKATKEQKI

SEQ ID NO: 278 - protein, 46 aa, Homo sapiens
ILYYQGVSEIYMNLSINNWYILFICIKIRSLLHPQHHIPYPQNNGE

SEQ ID NO: 279 - protein, 20 aa, Homo sapiens
KKKKREWGEGEGRKRGKWVL

SEQ ID NO: 280 - protein, 37 aa, Homo sapiens
  misc_feature (23): Xaa equals any of the naturally occurring L-amino acids
LLSKINLSTRKSTRRHRAPSWAXDLREYVGKREGAIS

SEQ ID NO: 281 - protein, 96 aa, Homo sapiens
FLPFLFTKISSFLLLSFCLFFSTILQTFFFSIFLFYCLLISSSFFIPSLLCLPLIFFFNIIGFAQIFSTSIHLFFYIASVKFLICLKQISLCIINQ

SEQ ID NO: 282 - protein, 141 aa, Homo sapiens
  misc_feature (130): Xaa equals any of the naturally occurring L-amino acids
  misc_feature (140): Xaa equals any of the naturally occurring L-amino acids
EREMLQAPRGRARAALRRLAVATRTMAGGSLALGSVTVHSSEPEVRIPENNPVKLSCAYSGFSSPRVEWKFDQGDTTRLVCYNNKITASYEDRVTFLPTGITFKSVTREDTGTYTCMVSEEGGNSYGESXSSSSCLCLHXG

SEQ ID NO: 283 - protein, 36 aa, Homo sapiens
NCYHSLLLSSCAKHANVATKSYYNLLTVSYNGEKRC

SEQ ID NO: 284 - protein, 54 aa, Homo sapiens
  misc_feature (17): Xaa equals any of the naturally occurring L-amino acids
PGIRILGFLLSGLSVPXRLCKSNCGFGIKSNNKNCNYFCTNIIDEEQCGFDDLS

SEQ ID NO: 285 - protein, 51 aa, Homo sapiens
GTAATHPLLCTWFLTGHGLVQGIMQGWGPTRLHRVLVKKKFALAGRGGSRL

SEQ ID NO: 286 - protein, 89 aa, Homo sapiens
  misc_feature (43): Xaa equals any of the naturally occurring L-amino acids
HSHSPDHACIWMDEGAKVPRGSRAAKATLPPAKGAAPQCSSSXERARSWGSHLCVGEQNPSHASGFCSWDTKVKMGRWEEDVLIPGHVF

SEQ ID NO: 287 - protein, 59 aa, Homo sapiens
ISAPCLRKNQFGYSFLESRIIVKELRTLGVLRVVVKMNWMCVCTCGSMQSTRCKACYLC

SEQ ID NO: 288 - protein, 83 aa, Homo sapiens
HEEKQRGSSSSGRKGQQTLEGRVFWEPQSSDGFSIFPWRRGWVLESPPFSAPYTQFVLRSRHEVCAHPSAHSLLLSSIPICWA

SEQ ID NO: 289 - protein, 51 aa, Homo sapiens
  misc_feature (36): Xaa equals any of the naturally occurring L-amino acids
  misc_feature (39): Xaa equals any of the naturally occurring L-amino acids
  misc_feature (47): Xaa equals any of the naturally occurring L-amino acids
TLTNQKKILIKVYIFSGTPDIVYSSTIPFIKCSQAXLLXNFCTLAGXQQWR

SEQ ID NO: 290 - protein, 50 aa, Homo sapiens
  misc_feature (43): Xaa equals any of the naturally occurring L-amino acids
QVWRQRRVKEGDGSGAGAGRVHVAWGGGGGKSPDKDAWGCMQXEGMPESS

SEQ ID NO: 291 - protein, 45 aa, Homo sapiens
  misc_feature (27): Xaa equals any of the naturally occurring L-amino acids
  misc_feature (45): Xaa equals any of the naturally occurring L-amino acids
LAQSRVTENYSLKDYLGSESFQKITQXFPQFLKVKAFQGKIKSGX

SEQ ID NO: 292 - protein, 52 aa, Homo sapiens
KTMLFIVQEQSRLLKWDIVTKCCQLMLYLISNTCKTFILLSRLTKKTKRSCL

SEQ ID NO: 293 - protein, 55 aa, Homo sapiens
WKLFICPQERMNNLIENAKGVILGEHLMSSEEKHRQIFYSLPYFPLYFQDVGIKM

SEQ ID NO: 294 - protein, 27 aa, Homo sapiens
LPTSSQPIALTLGPLSMFSKQEKQQLI

SEQ ID NO: 295 - protein, 55 aa, Homo sapiens
  misc_feature (53): Xaa equals any of the naturally occurring L-amino acids
NELIPLILKLELAYITIGRTWSCLARWKCSGKLLLLVDVEVRVRILQCLVKGXRL

SEQ ID NO: 296 - protein, 55 aa, Homo sapiens
NIRFLNPIVTWHQNYTITTRHFSAESFLGNNASFLPLSLHKQKNMESIFSQKINM

SEQ ID NO: 297 - protein, 38 aa, Homo sapiens
ILVSSFLTLICFFCTNCLMSYLISHLGDIGNYYLHTCR

SEQ ID NO: 298 - protein, 113 aa, Homo sapiens
  misc_feature (74): Xaa equals any of the naturally occurring L-amino acids
  misc_feature (82): Xaa equals any of the naturally occurring L-amino acids
  misc_feature (107): Xaa equals any of the naturally occurring L-amino acids
TVGRVLTRDGSSASWGGGVPSGMEEGLASLSVVTSPSVSASNEGNPSSSTGRLSSVSVRTASKFASFSSSIFCXKRKKQKMXVDPGRQVTLCINMFDQMSEPYVKSXMPIPEH

SEQ ID NO: 299 - protein, 44 aa, Homo sapiens
VSGNPLGKILFLAPIEDQVFQVIYMVLKFLIHELLNIFKFNTAF

SEQ ID NO: 300 - protein, 95 aa, Homo sapiens
  misc_feature (25): Xaa equals any of the naturally occurring L-amino acids
PRASVYVNSPIQMLVETSHVQLTQXIIQTPQEFKDFCQYACNISFRTRRKPVEGKPTVANQFQCPTQCSLDSLYMHTVASVFVWLQSQNVGFFWP

SEQ ID NO: 301 - protein, 30 aa, Homo sapiens
  misc_feature (30): Xaa equals any of the naturally occurring L-amino acids
IHRASACWARKMPLMARGYVGSGYVPAVTX

SEQ ID NO: 302 - protein, 37 aa, Homo sapiens
IITLESCKEINLQGVFLCMFFIFVIWIRVKKLEKELL

SEQ ID NO: 303 - protein, 31 aa, Homo sapiens
LPPAQGHTGPCNFSFYIIQGIRLQYNCSRCL

SEQ ID NO: 304 - protein, 35 aa, Homo sapiens
  misc_feature (23): Xaa equals any of the naturally occurring L-amino acids
KVCKHKNTHCICFQISASGQDVXVEILFTFPPEMT

SEQ ID NO: 305 - protein, 47 aa, Homo sapiens
  misc_feature (27): Xaa equals any of the naturally occurring L-amino acids
SYRSPKYPLGTPRDPGLPCPVESGYCXSVNLCDQENVTWVTFAQVLC

SEQ ID NO: 306 - protein, 198 aa, Homo sapiens
  misc_feature (163): Xaa equals any of the naturally occurring L-amino acids
  misc_feature (183): Xaa equals any of the naturally occurring L-amino acids
  misc_feature (190): Xaa equals any of the naturally occurring L-amino acids
  misc_feature (194): Xaa equals any of the naturally occurring L-amino acids
LTSFLKHLKPPFQRCPNRKKVFVEDDENSSQKRSVIVCQSRNEAQGKTVSQNQPDVSHTSRPSPSIAVKANTNKPHVPKPIEPLHNLSLTEKSWPKDSSVVYAKSLEHSGSLDDPNRISLVKRNAVLPSKPLQDREAMDDKPGVSGQLPKGKALELALKRPRXPVLSVCSSSETPYLLKETNXGNGQGEXRNLXTIQS

SEQ ID NO: 307 - protein, 57 aa, Homo sapiens
  misc_feature (27): Xaa equals any of the naturally occurring L-amino acids
  misc_feature (36): Xaa equals any of the naturally occurring L-amino acids
  misc_feature (46): Xaa equals any of the naturally occurring L-amino acids
  misc_feature (57): Xaa equals any of the naturally occurring L-amino acids
NFAYVCLGLLDLIKTLVILLCIHTVLXVLIAWLGVXRMTIAACTSXSGDFLLTQSIX

SEQ ID NO: 308 - protein, 35 aa, Homo sapiens
  misc_feature (12): Xaa equals any of the naturally occurring L-amino acids
LKIFFQLQDLHXGKQNNLNVSTLITDLFKLINFML

SEQ ID NO: 309 - protein, 39 aa, Homo sapiens
GFKDPRPALECEEMGFKLLAEVLRDEFSEAVLSKRIFLR

SEQ ID NO: 310 - protein, 85 aa, Homo sapiens
  misc_feature (29): Xaa equals any of the naturally occurring L-amino acids
  misc_feature (37): Xaa equals any of the naturally occurring L-amino acids
  misc_feature (38): Xaa equals any of the naturally occurring L-amino acids
  misc_feature (77): Xaa equals any of the naturally occurring L-amino acids
  misc_feature (85): Xaa equals any of the naturally occurring L-amino acids
GDSYHKPKRQALGEPNPGNTLILDFQPPXLFEKINFXXLSHSLYSILLWQPKLTNLLIYLFNEYSPQFFTLLQIHSXCLNMHRLX

SEQ ID NO: 311 - protein, 70 aa, Homo sapiens
RRSPSFLPHEPLTRLLMTWQLVFPRPCATREKESKQAGSCPVFYNLILEVVFHHFCCILLVSVGKDCIEV

SEQ ID NO: 312 - protein, 113 aa, Homo sapiens
REQKLELHRGGGRSRTSGSPGLAAAIGPTIFVDVDPNASLSREEIFGPVLVVTRFTSEEQALQLANDSQYGLGAAVWTRDLSRAHRMSRRLKAGSVFVNNYNDGDMTVPFGRL

SEQ ID NO: 313 - protein, 48 aa, Homo sapiens
ERVEVSKVPSGLQLGQLTENRKELPLRGRKENDTESMLGHIGFKGISL

SEQ ID NO: 314 - protein, 39 aa, Homo sapiens
  misc_feature (17): Xaa equals any of the naturally occurring L-amino acids
GNPASLAGSSTTGARSXAPVARTQRCPTYPEAKGNEIGI

SEQ ID NO: 315 - protein, 39 aa, Homo sapiens
VRGSKLGATFQPPSLRDIWQYLETFLVVVMGWGADLIHS

SEQ ID NO: 316 - protein, 119 aa, Homo sapiens
  misc_feature (45): Xaa equals any of the naturally occurring L-amino acids
  misc_feature (97): Xaa equals any of the naturally occurring L-amino acids
STLALNFIAVNQLHCVAFQLLILPFRLFRAQIKAKRRQCLVIISXIRPSLHVLHTPRQSAAHHSDDKIHALSGCIRSRGNSDAFADKPAQDQQPVYXAALVTGKTRSIQHVSSFTAELV

SEQ ID NO: 317 - protein, 42 aa, Homo sapiens
PLGDLEALQKQEVKAKAELFGWLVQKIAVLSFQRNYFGTNLM

SEQ ID NO: 318 - protein, 109 aa, Homo sapiens
  misc_feature (107): Xaa equals any of the naturally occurring L-amino acids
  misc_feature (109): Xaa equals any of the naturally occurring L-amino acids
VLSEFLHEEKTSIWVVMLMVGAVDPVFYNNMISNNNMTNMISNMISNNMTNMISNMISYNMIILLIILLIILTISYGIVILGSGLISILALYINTIIILNFINKETXVX

SEQ ID NO: 319 - protein, 48 aa, Homo sapiens
  misc_feature (9): Xaa equals any of the naturally occurring L-amino acids
  misc_feature (13): Xaa equals any of the naturally occurring L-amino acids
  misc_feature (15): Xaa equals any of the naturally occurring L-amino acids
DRVSLCRPXWGAXAXSRLTASSASRVHAILLPQPPEQLGLQAPATMPS

SEQ ID NO: 320 - protein, 64 aa, Homo sapiens
FIKQSLIVVQTTSLSFFGCSVTKISQSTSVTPIDKLTDRGKKGAVSGVQALAILMGILCPVLMT

SEQ ID NO: 321 - protein, 100 aa, Homo sapiens
  misc_feature (62): Xaa equals any of the naturally occurring L-amino acids
AVGVGNGESLDQSKACSPEDPGVAKAATETTAAGAVAAAPTHELTLIPSPGAPAPPSPIQPXGGRLGKFPALQEASWLLIGQCEQTVETGGHVTLKIPAS

SEQ ID NO: 322 - protein, 57 aa, Homo sapiens
  misc_feature (48): Xaa equals any of the naturally occurring L-amino acids
  misc_feature (52): Xaa equals any of the naturally occurring L-amino acids
WPLSSHCFKQGIKHLWLKFVKLCSHPPFRPDRRDFRILREQLFPDLKXHSSXKANVT

SEQ ID NO: 323 - protein, 60 aa, Homo sapiens
  misc_feature (59): Xaa equals any of the naturally occurring L-amino acids
MKASFLFFPLVSNSWTQVILLPQPSEMLELQAEPLHPAQFSSSVAVLSNFSLISISHHXQ

SEQ ID NO: 324 - protein, 121 aa, Homo sapiens
  misc_feature (38): Xaa equals any of the naturally occurring L-amino acids
  misc_feature (68): Xaa equals any of the naturally occurring L-amino acids
  misc_feature (69): Xaa equals any of the naturally occurring L-amino acids
  misc_feature (72): Xaa equals any of the naturally occurring L-amino acids
  misc_feature (73): Xaa equals any of the naturally occurring L-amino acids
  misc_feature (75): Xaa equals any of the naturally occurring L-amino acids
IMFLLHITSQLYPIYQKLEFGDVTSSWFVGTINPVTNXRKTYTQNLEWKWCWGISESLQLLFSVLLSXXYKXXLXRDMLVCEGASSTKLMFFNSCKIKCTPLSFTSLFLMCQVRHFTSSHD

SEQ ID NO: 325 - protein, 72 aa, Homo sapiens
  misc_feature (53): Xaa equals any of the naturally occurring L-amino acids
  misc_feature (58): Xaa equals any of the naturally occurring L-amino acids
  misc_feature (60): Xaa equals any of the naturally occurring L-amino acids
  misc_feature (61): Xaa equals any of the naturally occurring L-amino acids
CLGSQPEAPELRVTLVYEAVAGGSPSKVFFLVLCLTHWQGWLEGWAQLGRLLXHLSAXTXXWQPPWVVRLLK

SEQ ID NO: 326 - protein, 49 aa, Homo sapiens
  misc_feature (37): Xaa equals any of the naturally occurring L-amino acids
MCIHTRVSQIVRLIPQYSICFVTDFTVLSTFLIYKKXKKENLIQQFLKS

SEQ ID NO: 327 - protein, 46 aa, Homo sapiens
CGRSLKDGSLCSQCEYLVPERAEQTLFSENCVYLFDSSAEGIRVKE

SEQ ID NO: 328 - protein, 49 aa, Homo sapiens
VSETLKGRQYQIYIIKNCRQFMDYFPLNFQRCNSIPFRDVATALWRELG

SEQ ID NO: 329 - protein, 87 aa, Homo sapiens
  misc_feature (69): Xaa equals any of the naturally occurring L-amino acids
  misc_feature (82): Xaa equals any of the naturally occurring L-amino acids
QKRKCSFQRAQPEPHGCAGQQEGSRSLKPSMPLSPYRYSDGYRSSSLLRAVAHLRSQLWAHLPRAPLAXRWSPSAWCWVGGXCRPWY

SEQ ID NO: 330 - protein, 65 aa, Homo sapiens
  misc_feature (1): Xaa equals any of the naturally occurring L-amino acids
XFFETYLSLSPRLECSGKISAHCKLRLPGSRHSPASASRVAGTTGARHHALLIFFIFSSDGVSPC

SEQ ID NO: 331 - protein, 83 aa, Homo sapiens
ITPHNRQNLNAVHHRSYGVHSFIESISPQARYIEQVQNYSIYSFRLLLNKSKDSLMRSCVLSRISIIEHFLLFLLIFLLVDSH

SEQ ID NO: 332 - protein, 142 aa, Homo sapiens
  misc_feature (16): Xaa equals any of the naturally occurring L-amino acids
  misc_feature (96): Xaa equals any of the naturally occurring L-amino acids
RFKGRRGRVLAGRPAXGERPASGSALGLGLRSGSVPRPRQLRAFPAPARALPLSPALTAVSLHFSLLGPRRLGHLLRTPTRAALATVTRETSDVTXAFSTLLYGGRGGAKSSESDRRADGALGWIQASTISRGGPYPIRPNT

SEQ ID NO: 333 - protein, 75 aa, Homo sapiens
WDMGAGTPSLAFPLPSLLSFSPLLPMGLGSHHSPLRESSSKDIALFRNRFKASKLLISASQAKIWHQTTHIGCTD

SEQ ID NO: 334 - protein, 87 aa, Homo sapiens
YLWGFVFNWPNKPAVKSESSVKRRLHRVWGESALVRRASIHFPEQSRQEELQAHFRTSTSDSRFRTAVLCVHAPGTNHTSGPDFRSH

SEQ ID NO: 335 - protein, 32 aa, Homo sapiens
IISNCLPTKYLLIRKRKKRHATVKKSGRPYLN

SEQ ID NO: 336 - protein, 70 aa, Homo sapiens
  misc_feature (47): Xaa equals any of the naturally occurring L-amino acids
RSLREIRALGLSTHPSISEIRGDRVSDNVSQSWSTFGERPESNGGRXGEGARSETKASPDILCFAGHSSG

SEQ ID NO: 337 - protein, 56 aa, Homo sapiens
  misc_feature (45): Xaa equals any of the naturally occurring L-amino acids
MAGSAQCSLREMRNRHTSMLDADAVQEMLPQNMAPQHTEYFKQKXIKKTTKTERSL

SEQ ID NO: 338 - protein, 79 aa, Homo sapiens
  misc_feature (2): Xaa equals any of the naturally occurring L-amino acids
  misc_feature (55): Xaa equals any of the naturally occurring L-amino acids
  misc_feature (56): Xaa equals any of the naturally occurring L-amino acids
GXEDRVHASAIGQGKIQPPVTKSQAFGLQSEGKEITCSCSLICPPGGSDERRDSXXRGPSAWREGRNQFPNWYHIHQVK

SEQ ID NO: 339 - protein, 60 aa, Homo sapiens
  misc_feature (25): Xaa equals any of the naturally occurring L-amino acids
  misc_feature (27): Xaa equals any of the naturally occurring L-amino acids
SSSLITVARVRELRLYKRRPRCFPXVXTELAETGVLSREAPSDTTAALTSVTTCKQMLSP

SEQ ID NO: 340 - protein, 94 aa, Homo sapiens
  misc_feature (33): Xaa equals any of the naturally occurring L-amino acids
  misc_feature (90): Xaa equals any of the naturally occurring L-amino acids
NPNSVLLTTGCFQSFFLASSLIAPLQGPVYCPXNVLAHFSLRVFDYTLPSFLHLSDASQSFKTQLISNLLRGAFPDFHSPSRHCGCQLLXPSIT

SEQ ID NO: 341 - protein, 126 aa, Homo sapiens
  misc_feature (9): Xaa equals any of the naturally occurring L-amino acids
  misc_feature (37): Xaa equals any of the naturally occurring L-amino acids
  misc_feature (67): Xaa equals any of the naturally occurring L-amino acids
NFIKKYNDXGTNYRPLNSHNRLRRAVLLCKVPSQTPXGYRAGMVHGLGKSIWAEREGQGQPVGGDMXGLTPHLYLKPPSHRGASWGPSLGVSIHGGHPHVWAEPGYVGMWGVQPKEGRNPQGLVLG

SEQ ID NO: 342 - protein, 62 aa, Homo sapiens
  misc_feature (6): Xaa equals any of the naturally occurring L-amino acids
RSLSCXFTPCACRLTHGVTNIEHPLPPTPDTVLSSRYTHLYLPCNICILQGQCLGSGPGSGL

SEQ ID NO: 343 - protein, 69 aa, Homo sapiens
  misc_feature (15): Xaa equals any of the naturally occurring L-amino acids
NFWLPIDYSSMSDKXICFLPFVLVLELAIKKYAGLLCTLFNSIIAQLHLIELFTYTRVLSLEEHLQADS

SEQ ID NO: 344 - protein, 70 aa, Homo sapiens
IKTGFCCVHYWRKYLQWIVITSLPKVAVFWQEVRKTNQRKGGLRGKRHEVLPFLNMPRVVLQITEGHLKV

SEQ ID NO: 345 - protein, 46 aa, Homo sapiens
TIQSTFNEGLLFSGHSTRPEDTEVNQTLPLTLRSFWTSGKEGSHEN

SEQ ID NO: 346 - protein, 110 aa, Homo sapiens
  misc_feature (84): Xaa equals any of the naturally occurring L-amino acids
  misc_feature (102): Xaa equals any of the naturally occurring L-amino acids
  misc_feature (106): Xaa equals any of the naturally occurring L-amino acids
  misc_feature (110): Xaa equals any of the naturally occurring L-amino acids
LACLWSPPTPTRLRESPLHTHTTTYFRRAAAFPPGFLTPFLSLQGRGPEELEAQGPCSGPRAWGHLPPRAKRRMDVDTAPRAWXGHSSSSAEPRQALGTCWXSGGXPRGX

SEQ ID NO: 347 - protein, 51 aa, Homo sapiens
  misc_feature (20): Xaa equals any of the naturally occurring L-amino acids
  misc_feature (35): Xaa equals any of the naturally occurring L-amino acids
  misc_feature (38): Xaa equals any of the naturally occurring L-amino acids
  misc_feature (49): Xaa equals any of the naturally occurring L-amino acids
LPLLKLSGYESKRDCFKMLXVIPRLTTKRIHLKYXWVXGITKGILKDPXEN

SEQ ID NO: 348 - protein, 73 aa, Homo sapiens
  misc_feature (1): Xaa equals any of the naturally occurring L-amino acids
  misc_feature (20): Xaa equals any of the naturally occurring L-amino acids
  misc_feature (31): Xaa equals any of the naturally occurring L-amino acids
  misc_feature (40): Xaa equals any of the naturally occurring L-amino acids
  misc_feature (43): Xaa equals any of the naturally occurring L-amino acids
XSWNLEKLAAGTAALSMPCXTSPDASSCVLXEMGLDKQAXMQXDVGGTISPGDPSREWFSCGLCRALPGVREC

SEQ ID NO: 349 - protein, 50 aa, Homo sapiens
  misc_feature (19): Xaa equals any of the naturally occurring L-amino acids
REPSSAGLSPKSQMSMNSXVFFTDFCSGRTKFQMSHSQVYSKDVVVFCFE

SEQ ID NO: 350 - protein, 53 aa, Homo sapiens
  misc_feature (9): Xaa equals any of the naturally occurring L-amino acids
  misc_feature (51): Xaa equals any of the naturally occurring L-amino acids
SVGSWGTGXVKGISQDFSTKGSLKNYYPLSPALSQEVLTPLSANISLSVKXLP

SEQ ID NO: 351 - protein, 62 aa, Homo sapiens
LSQSSPRVSHLGSSLVPKEQFCALDLCSHNCVTESLLEPLSCRVYPFEQLPTLLQLGAALNS

SEQ ID NO: 352 - protein, 94 aa, Homo sapiens
  misc_feature (85): Xaa equals any of the naturally occurring L-amino acids
  misc_feature (92): Xaa equals any of the naturally occurring L-amino acids
TKILIPKPSVRGLAKFGFPYSSTSTFPCSQAEGFLNVPSSLCLLRPALHWHLSYLSLIHVMPTQLQDLIQVPSAPSRLSDNPSFXPGVLPFXDS

SEQ ID NO: 353 - protein, 58 aa, Homo sapiens
RAYLHDLKRAKMGLGGMPDRNHPACAKADLEEVVRVCPGFKAYLDIGQVRQSLGLANS

SEQ ID NO: 354 - protein, 34 aa, Homo sapiens
LFQNLIAGCWLKLTDNINSPLTHILYVICIIYLQ

SEQ ID NO: 355 - protein, 59 aa, Homo sapiens
LGSPSGGKFESQPVLPSALFSSATETGCSATQDPDGEATRVRVAASPQWILMRNKPLLM

SEQ ID NO: 356 - protein, 64 aa, Homo sapiens
QSIGDVQEGCDPIVLSLWETGGGACTLADKLLVETAGCACPSDTRFCKTDCLLKISLSLLKKKK

SEQ ID NO: 357 - protein, 92 aa, Homo sapiens
  misc_feature (91): Xaa equals any of the naturally occurring L-amino acids
HEVKMDGARVSALCSGLKRSERGGSGNSSPNSNLVLVVLAAAAEAGAMAELEHLGGKRAESARMRRAEQLRRWRGSLTEQEPADDEARGGXA

SEQ ID NO: 358 - protein, 97 aa, Homo sapiens
ELSLQRGRIRTLWAHRVVASTPEWEKAWIICKGNPVLIFATLKKNLFLVLWCYFALFYDLFLDDRYSDYRKKKDSSSLFFLNFKLFFHVCVICSLGA

SEQ ID NO: 359 - protein, 70 aa, Homo sapiens
  misc_feature (56): Xaa equals any of the naturally occurring L-amino acids
  misc_feature (65): Xaa equals any of the naturally occurring L-amino acids
EHDQIQLVCNKMNFSAELSPSFSHYNLIVILKSPPKMEVICHFLYMCYQKGVLIQXPKRGFLGSXRQQRV

SEQ ID NO: 360 - protein, 74 aa, Homo sapiens
  misc_feature (56): Xaa equals any of the naturally occurring L-amino acids
SLSHNVLIQQTLYLGYIFNNKFVSIIYLSLGGKYLHLFIYPLEAINTWATPPWNCXWGVSTMGLKIKFGGVAGF

SEQ ID NO: 361 - protein, 80 aa, Homo sapiens
  misc_feature (14): Xaa equals any of the naturally occurring L-amino acids
SLISLAMILFPLIXITKNLNNIHWCVKIHLCIFCSYKDIFGLKIFLCFVLLSWCRFPTKLRVINITKDSMLECVYVCMFK

SEQ ID NO: 362 - protein, 87 aa, Homo sapiens
VYKSHLNIYLCNVISAVLSLFYPPAPVVDVIILGTETLCLKKIRCQFSQDVLYLRFWKDVYLYRNTSTLLNVLKLFLLKKKKKKFSV

SEQ ID NO: 363 - protein, 45 aa, Homo sapiens
QILVEMEKNSCSSWLRSWDMVAIWYPLFAYHCSHYFSSVSPVIMI

SEQ ID NO: 364 - protein, 84 aa, Homo sapiens
  misc_feature (75): Xaa equals any of the naturally occurring L-amino acids
  misc_feature (84): Xaa equals any of the naturally occurring L-amino acids
SPVWTEKRKMQDTGSVVPLHWFGFGYAALVASGGIIGYVKAGSVPSLAAGLLFGSLAGLGAYQLSQDPRNFGFSXFADGRQSWX

SEQ ID NO: 365 - protein, 95 aa, Homo sapiens
ERCGLGTPGAPHSSGCPAAAAHSQRWPSCVAFWRGSWKASAELALGRVSGSSRPVRAAHPRGRRLRRAWHCHLSRPALAPPELLYPSPLLHLRNP

SEQ ID NO: 366 - protein, 34 aa, Homo sapiens
ATCDFPDGQHWATAGGSGWLLTSPRAWLHLGSLW

SEQ ID NO: 367 - protein, 67 aa, Homo sapiens
  misc_feature (28): Xaa equals any of the naturally occurring L-amino acids
  misc_feature (45): Xaa equals any of the naturally occurring L-amino acids
SKAAIPEDDMLSATPLYGNVHSWMNSEXVRMCGASEDRKILVNDXDASKARLELREENPLNHNVVDA

SEQ ID NO: 368 - protein, 62 aa, Homo sapiens
  misc_feature (1): Xaa equals any of the naturally occurring L-amino acids
  misc_feature (3): Xaa equals any of the naturally occurring L-amino acids
  misc_feature (4): Xaa equals any of the naturally occurring L-amino acids
  misc_feature (8): Xaa equals any of the naturally occurring L-amino acids
XEXXPFAXFSISIDITPSFSCSSQKPRVLSFSYIPHLICQQSMADCTFKIYPESNHFLLFLP

SEQ ID NO: 369 - protein, 36 aa, Homo sapiens
  misc_feature (17): Xaa equals any of the naturally occurring L-amino acids
  misc_feature (18): Xaa equals any of the naturally occurring L-amino acids
FSCDCEDITSADFQVWXXPLPHEPDLCLIPWISTGQ

SEQ ID NO: 370 - protein, 68 aa, Homo sapiens
  misc_feature (50): Xaa equals any of the naturally occurring L-amino acids
  misc_feature (67): Xaa equals any of the naturally occurring L-amino acids
NMFKQATWKQRDKEAKYTKPQSPPSCFPFDPVSRSLLVRAPSMTPLPTSXKNLVWASLPSPKCSHLXP

SEQ ID NO: 371 - protein, 94 aa, Homo sapiens
PHPVATEAGKYSLYFGHPCVQQNWGFHQSARTGEWPMQWLMLVSQHFGRSRWADHLRSGVQDQPGQYGETLSLLKIKKLAGCAGAPVVPATLGS

SEQ ID NO: 372 - protein, 84 aa, Homo sapiens
  misc_feature (83): Xaa equals any of the naturally occurring L-amino acids
GTSMSSLINNAMSGLNAAQAALNTASNNISSYNVAGYTRQTTIMAQPIARWALAAGLAMVSTFLVCSVSMMRLLPTSYVRRRXS

SEQ ID NO: 373 - protein, 125 aa, Homo sapiens
  misc_feature (33): Xaa equals any of the naturally occurring L-amino acids
  misc_feature (66): Xaa equals any of the naturally occurring L-amino acids
  misc_feature (82): Xaa equals any of the naturally occurring L-amino acids
  misc_feature (91): Xaa equals any of the naturally occurring L-amino acids
  misc_feature (112): Xaa equals any of the naturally occurring L-amino acids
WACFGLDSPRSSAGTHTGAGIAPFRHVELAGAXGHALVWTARPWGWNRKCLRPFTLPRGQHPQPSXGFPQVNEVVFSPGESXCATCSEGWXCAGVGLGQHGACDPVPGAETXLLCLAWSPRAVAA

SEQ ID NO: 374 - protein, 96 aa, Homo sapiens
ADIVNLNRVQFIIFPYIVGPFLGSCLRNFCILQSCEDIFLCFLQKALLFFHSYLDLLSGGFISYVWWEIGTRILFFIWTFHIIQHHIFVFKKPTKP

SEQ ID NO: 375 - protein, 62 aa, Homo sapiens
  misc_feature (19): Xaa equals any of the naturally occurring L-amino acids
  misc_feature (40): Xaa equals any of the naturally occurring L-amino acids
KCALFSNNLYIVNFGGVSXYVYAYFFFLHKFLGIFFHKEXKIKSKFIFNSCLLGFNYSELKI

SEQ ID NO: 376 - protein, 113 aa, Homo sapiens
PVCLGSFPASSHMTVSVYFSLWPSCLRVPVPPRVSSTALDIASAMAPHQGLLPGHIPSLSHPSSLRLPFSLPSSLCYCQWRVCALCRFDPMTLYLWLFLQVPRRGPAPGPERG

SEQ ID NO: 377 - protein, 49 aa, Homo sapiens
LHHFLFIRTYSTKQIALSYNLLLLYPVLTLILILDLQLSIFNAKLLKFL

SEQ ID NO: 378 - protein, 80 aa, Homo sapiens
  misc_feature (7): Xaa equals any of the naturally occurring L-amino acids
  misc_feature (41): Xaa equals any of the naturally occurring L-amino acids
PLTSAAXHQDKPPEFPSMVRLKLKAAVHRILPEKGLIFGLXLSLSCLLYSLPSFPEDHILNKSLAEKSSLHQDLLLGTPT

SEQ ID NO: 379 - protein, 57 aa, Homo sapiens
TFFLACLFIENKARFPCCACWRLWSSLVSALSVGFSAQVKSRGSPVGFTFPTCNNSY

SEQ ID NO: 380 - protein, 66 aa, Homo sapiens
  misc_feature (62): Xaa equals any of the naturally occurring L-amino acids
GRRIAGTREAEAAVRRDHATALQPGQQSETQSQKKKKKKNSRGGPVPNSPYSESYYNSLAVXLKTS

SEQ ID NO: 381 - protein, 36 aa, Homo sapiens
  misc_feature (33): Xaa equals any of the naturally occurring L-amino acids
DYRCEPLRLAPYCYYLSSIPLSKVEQVKVRGIXTLH

SEQ ID NO: 382 - protein, 60 aa, Homo sapiens
  misc_feature (3): Xaa equals any of the naturally occurring L-amino acids
  misc_feature (7): Xaa equals any of the naturally occurring L-amino acids
TGXTVCXDGLQHPASGAALPFQKRPGSGLDDGGKRAGSGGRLIANSDARTENLRGPRRLR

SEQ ID NO: 383 - protein, 39 aa, Homo sapiens
  misc_feature (9): Xaa equals any of the naturally occurring L-amino acids
KCFLLSPQXAKIQNSVNSMLLYEVVFFKAHLFMTSLHSQ

SEQ ID NO: 384 - protein, 56 aa, Homo sapiens
NIHMHCFNKQCFPRPPHRVDALERKARLFSEVLHLLGQCAHAREEQCMASLRSTAM

SEQ ID NO: 385 - protein, 73 aa, Homo sapiens
GVATCPAAFCARLASLQATPSMGAHGAAVGSGGASTLMVPPWESWPSILPNQMTSVPPPPGSLCRSSFWVLVH

SEQ ID NO: 386 - protein, 56 aa, Homo sapiens
GVGNGAGLNLKRTKGESGLWFSPLQTHYLCGRGLRTRGRKVDVEGGSIERSTCTYV

SEQ ID NO: 387 - protein, 81 aa, Homo sapiens
  misc_feature (38): Xaa equals any of the naturally occurring L-amino acids
  misc_feature (39): Xaa equals any of the naturally occurring L-amino acids
  misc_feature (50): Xaa equals any of the naturally occurring L-amino acids
FRGGAERGQFHPSLARLGGGSSYTRSPSDHQGFLAESXXRCQPGTPQTRXSSRLRHKEPGGFYFLLINLVGSRAIVKAERY

SEQ ID NO: 388 - protein, 37 aa, Homo sapiens
  misc_feature (2): Xaa equals any of the naturally occurring L-amino acids
GXERLSRQGAVAHACNPSTLGDQGGPITGSGDGDHPG

SEQ ID NO: 389 - protein, 30 aa, Homo sapiens
  misc_feature (30): Xaa equals any of the naturally occurring L-amino acids
LYCSLLCVWLLVKFKKVKKKKKNLGGGPGX

SEQ ID NO: 390 - protein, 67 aa, Homo sapiens
  misc_feature (44): Xaa equals any of the naturally occurring L-amino acids
  misc_feature (52): Xaa equals any of the naturally occurring L-amino acids
HGELRLYQKYKRIGRMWWRAPVVPATREAEAGEWRAPVKADLQXAEMVLLHXSLGYRARLCLKKKKK

SEQ ID NO: 391 - protein, 104 aa, Homo sapiens
  misc_feature (91): Xaa equals any of the naturally occurring L-amino acids
GVWSTKCCEHFCCLQKPFFRGNLYVKGPNGCKALCLRRGRAEKGGDEVSGVGCAWPPLHPLSHSLRFFQGSLQNLHKDKVLRLGGCGLHAXYSQHFGEAKVEAD

SEQ ID NO: 392 - protein, 65 aa, Homo sapiens
  misc_feature (60): Xaa equals any of the naturally occurring L-amino acids
SQHWEAKVDKLLEPRSSRLVWATGKALSLEKIQKISQVWWCTLLVPATQRAEVGGSPVPXRLRLQ

SEQ ID NO: 393 - protein, 86 aa, Homo sapiens
GNISTWGGSVWYPAECVMGDGHGRNTHTEVAACHRGAAGVAMPGETRLPGLSVGPVGQQLGTSQAALQVGTPKGSLRIEEGKMGIP

SEQ ID NO: 394 - protein, 32 aa, Homo sapiens
QRLAKCGGLPVILATWEAEVGGLLEHRSLRLQ

SEQ ID NO: 395 - protein, 92 aa, Homo sapiens
TYFLSFFLFFPFFLLFLPSFFPFFFFFPFFVLSLLLPGLECNGRFSAHCNLRLPAQENGLNPGGGVCSEPRLCPLHPTMGDRRRRLRFKKKK

SEQ ID NO: 396 - protein, 76 aa, Homo sapiens
IFFLKTSVLFLEKEEKKKEGRRRRKKGGRRKKKSQCDNTLSDFLKSAYMSKKLFFPFLKYGSILYRLSLHVYFSPH

SEQ ID NO: 397 - protein, 29 aa, Homo sapiens
INSVSLFSCHSVKNVLIHKDKYLKRGNSF

SEQ ID NO: 398 - protein, 79 aa, Homo sapiens
  misc_feature (65): Xaa equals any of the naturally occurring L-amino acids
LVCLGSFCFFSSGIVYFMTMCRGGDGASLTSPGGLWLRCTLALLPGTALTLLFALSWGCVTTGSXLLSTLGSLGFLKKE

SEQ ID NO: 399 - protein, 66 aa, Homo sapiens
LGTQRQCNCLVRVVGLFARNLKFCFTPEPSHPSRNPNCLEQYSASIFCCSLYESSGTKGVQLTHIK

SEQ ID NO: 400 - protein, 70 aa, Homo sapiens
LLLNRKQIGTFPESIELFLRMAGHEFVRSPRWGLHFNQVLCLATVSLWGTLRDLGSIVICFCSAICVKKK

SEQ ID NO: 401 - protein, 79 aa, Homo sapiens
  misc_feature (59): Xaa equals any of the naturally occurring L-amino acids
  misc_feature (60): Xaa equals any of the naturally occurring L-amino acids
LLFVLDPVRVTLQCRWKESRTAERSSGPIFQDYCLLKTLESSENRFPSERGGRNKTTKXXSRGGPVPNSPYSESYYNSL

SEQ ID NO: 402 - protein, 23 aa, Homo sapiens
GKSQDFLTTMYYNLKLVNKKITP

SEQ ID NO: 403 - protein, 59 aa, Homo sapiens
  misc_feature (30): Xaa equals any of the naturally occurring L-amino acids
IEHLPFGQAFLGTGDSKYSHIPFLYRLARXKIHVLIHSTNICQSLLRLPDTILVLGMYQ

SEQ ID NO: 404 - protein, 50 aa, Homo sapiens
WLMLLNIFYVFICHLYYLFNEMSVHVFCIFSNWVYYYYLLWSLERVLYVF

SEQ ID NO: 405 - protein, 113 aa, Homo sapiens
  misc_feature (2): Xaa equals any of the naturally occurring L-amino acids
  misc_feature (98): Xaa equals any of the naturally occurring L-amino acids
  misc_feature (108): Xaa equals any of the naturally occurring L-amino acids
  misc_feature (110): Xaa equals any of the naturally occurring L-amino acids
FXAACASPFLFCHVLLVHTPDEPQMVGPDVIPLPHIYGARIKGVEVFCPLDPPPPYEAVVSQMDQEQGSSFQMSEGSEAAVIPLDLGCTQVTQDGDIXNIPCRRKLHXPXLPS

SEQ ID NO: 406 - protein, 59 aa, Homo sapiens
TRLQAGSHCRSDKLWVVNAEKATRVKLHLKKKKKKSCIRIWPHPFVCVLLRIALATSIL

SEQ ID NO: 407 - protein, 72 aa, Homo sapiens
  misc_feature (49): Xaa equals any of the naturally occurring L-amino acids
  misc_feature (58): Xaa equals any of the naturally occurring L-amino acids
  misc_feature (65): Xaa equals any of the naturally occurring L-amino acids
EVARQLVLPSLHKQGDGAQEAGFSSQNSGGRTPSPRGFPNSQRVVWQSXWALWCCLLXSSGSGWXWVLGVGY

SEQ ID NO: 408 - protein, 41 aa, Homo sapiens
  misc_feature (19): Xaa equals any of the naturally occurring L-amino acids
VAEMEFEPCVMALGLKLLXLSQVGWERTICLTLTQFPSLVL

SEQ ID NO: 409 - protein, 73 aa, Homo sapiens
  misc_feature (60): Xaa equals any of the naturally occurring L-amino acids
HTFLCVIHCVLVSTGWPESCSCFWCCHVFLFSLSLKKSPWFNTLKSQLEASRGSGGGDAXGPGWERPHGGGST

SEQ ID NO: 410 - protein, 106 aa, Homo sapiens
  misc_feature (12): Xaa equals any of the naturally occurring L-amino acids
  misc_feature (68): Xaa equals any of the naturally occurring L-amino acids
  misc_feature (92): Xaa equals any of the naturally occurring L-amino acids
  misc_feature (101): Xaa equals any of the naturally occurring L-amino acids
IGHRVAGPTAGXLTLVQFYFNYNHQNSYSQKFQSSYTINLHPTSVQSPLRGSQFWTLETLRELFKKIXSVFLVEMGFHPAYFRRLRPGEFTXNRGSWKFAXSPRFM

SEQ ID NO: 411 - protein, 57 aa, Homo sapiens
  misc_feature (48): Xaa equals any of the naturally occurring L-amino acids
TLSEGRDPAFASGPRWLQGLQDHQGPLQCDIAEGTLGLGQRWVNWVTXLGPGVSQPL

SEQ ID NO: 412 - protein, 51 aa, Homo sapiens
  misc_feature (47): Xaa equals any of the naturally occurring L-amino acids
FYSVVSQMRKCRGFFYIYIATLSSGPHKSHKYFVISTVYSAVYNSTXSTLY

SEQ ID NO: 413 - protein, 80 aa, Homo sapiens
  misc_feature (68): Xaa equals any of the naturally occurring L-amino acids
PRRLHLAVSLTSDPSLMQGCVGAACSLLQKMEKWQEARKTTRKAERAPQACSIRSGKSVSHGNEIPAXLGSFQLCRIPAA

SEQ ID NO: 414 - protein, 92 aa, Homo sapiens
  misc_feature (7): Xaa equals any of the naturally occurring L-amino acids
  misc_feature (87): Xaa equals any of the naturally occurring L-amino acids
  misc_feature (89): Xaa equals any of the naturally occurring L-amino acids
RTLGCWXCFFFSFFFPKTLHCHVSLRGEGFYCYVKGCVCSGSHDVRLGDSAMGRKSLPEPSSVCSMEDMCRSRSPQAAPAHLQQGHXPXKGT

SEQ ID NO: 415 - protein, 41 aa, Homo sapiens
LYYALDIAKVSLIFNYCDRNLLLCKLLYTCVTDEEILIILE

SEQ ID NO: 416 - protein, 26 aa, Homo sapiens
PTRPIYQNTSDYNKLASVLDEFQMKK

SEQ ID NO: 417 - protein, 84 aa, Homo sapiens
  misc_feature (8): Xaa equals any of the naturally occurring L-amino acids
  misc_feature (9): Xaa equals any of the naturally occurring L-amino acids
  misc_feature (55): Xaa equals any of the naturally occurring L-amino acids
PLLLPTHXXHSRGRNGSHQVPGPAFSCLIRLGLASDPNGSAPRPMEFFKLVPARXPAAGHEAVGCAQTASQPPLTRSLSHSVHC

SEQ ID NO: 418 - protein, 123 aa, Homo sapiens
  misc_feature (94): Xaa equals any of the naturally occurring L-amino acids
  misc_feature (103): Xaa equals any of the naturally occurring L-amino acids
  misc_feature (110): Xaa equals any of the naturally occurring L-amino acids
GHICFKSVQYNKDLPQGVVTIPDREPPNCNRLYPFLSFLFLRASSQIIARRNLGKSPLLLHTSQRCPKSSLMLFRRLRKQFCSSWAQRSSHFGXLSSNLPGQXGDSHGTXVIRLIIRDAKSNP

SEQ ID NO: 419 - protein, 81 aa, Homo sapiens
  misc_feature (5): Xaa equals any of the naturally occurring L-amino acids
  misc_feature (65): Xaa equals any of the naturally occurring L-amino acids
  misc_feature (69): Xaa equals any of the naturally occurring L-amino acids
SSHCXNKTPTQNSVLTYGRDWGSVPKMQQEEDLGSPAFCRAGTLASLDGKPAPWANSQQNAAAAXWCSXFPPLPVSSFPFR

SEQ ID NO: 420 - protein, 82 aa, Homo sapiens
IKAGGQKITEVLAWWFHWAGAVGTFVGIVVRSRHHAVGQKQSSSLRSFQHLPFFIFSLQHNVLQLFISKGSSFPHPVTNWGR

SEQ ID NO: 421 - protein, 88 aa, Homo sapiens
  misc_feature (1): Xaa equals any of the naturally occurring L-amino acids
  misc_feature (82): Xaa equals any of the naturally occurring L-amino acids
XLLSVFFVLFCFVFSQSLAVSPRLECSGMVSAHRKLHLPGFTPSPASASRVAETTSARHHAWANVVFVFLVDMGFHRVSLDXLDLPTS

SEQ ID NO: 422 - protein, 67 aa, Homo sapiens
  misc_feature (5): Xaa equals any of the naturally occurring L-amino acids
  misc_feature (7): Xaa equals any of the naturally occurring L-amino acids
  misc_feature (18): Xaa equals any of the naturally occurring L-amino acids
GRTYXGXLVRLQVPGPEXRVDPRVRSPPPPPKVTFAYVTLTHIIVRGPWVPKVVLSPDWSVTRVSSQ

SEQ ID NO: 423 - protein, 41 aa, Homo sapiens
LQIRFVAIEANWIPAQLCGLDSHHIKSSTRHSFLCSEHTTF

SEQ ID NO: 424 - protein, 85 aa, Homo sapiens
PDPRRSSRVTRHRGQQELGRWLDAAAAGTQRLGGLLGQGEKQRCNIFKISQSIRLHPGPWNRRQTELMFYTSGIGLSFFPLMPSI

SEQ ID NO: 425 - protein, 80 aa, Homo sapiens
  misc_feature (38): Xaa equals any of the naturally occurring L-amino acids
  misc_feature (63): Xaa equals any of the naturally occurring L-amino acids
SNVSLFCPPYWFLSHARQDITFFDANKTGQLVSRLTTXVQEFKSSFKLVISQVSGPVAPTTSXHTLSHVDSPGQPCPPQP

SEQ ID NO: 426 - protein, 89 aa, Homo sapiens
SQLFWLVAMGKLRMLVRQWTEEFTFLCFPAQLYLSNLYSISKRWSWNGAPWSFPVSCSRPGHRREYPQLSFYSFLPVPYSNRGGALTGF

SEQ ID NO: 427 - protein, 216 aa, Homo sapiens
  misc_feature (13): Xaa equals any of the naturally occurring L-amino acids
  misc_feature (124): Xaa equals any of the naturally occurring L-amino acids
  misc_feature (158): Xaa equals any of the naturally occurring L-amino acids
  misc_feature (177): Xaa equals any of the naturally occurring L-amino acids
  misc_feature (186): Xaa equals any of the naturally occurring L-amino acids
  misc_feature (193): Xaa equals any of the naturally occurring L-amino acids
  misc_feature (209): Xaa equals any of the naturally occurring L-amino acids
VCVISPQTVALGXPAQANVIVEAQALHQHGSVVPGVRLGEPRAEAPFHPLPPGKGLSRYFPQTLISPLDSLFIPFSRLSQPHHTPDTFLPPLQLLDRRQGHPAYPLSQSGCLGADILAHLLLLXLLFFPPLPSISSKPEMGLEVCRKTSRCYHSTNPXEKMSLVRPLLYLDLNSSCXKSQLGLGLXAMGQNSXCWSRQWDWKKFTFLCXPGQTVLE

SEQ ID NO: 428 - protein, 82 aa, Homo sapiens
  misc_feature (27): Xaa equals any of the naturally occurring L-amino acids
  misc_feature (52): Xaa equals any of the naturally occurring L-amino acids
  misc_feature (53): Xaa equals any of the naturally occurring L-amino acids
  misc_feature (73): Xaa equals any of the naturally occurring L-amino acids
EESPQLEGFQHAGRCPRSSRQKGRYLXRTTENPEVSKCQEENEKDHQVWAGXXEYMKIQFKVLENQGKILMGXGKPEWLFEP

SEQ ID NO: 429 - protein, 162 aa, Homo sapiens
  misc_feature (104): Xaa equals any of the naturally occurring L-amino acids
  misc_feature (110): Xaa equals any of the naturally occurring L-amino acids
  misc_feature (138): Xaa equals any of the naturally occurring L-amino acids
SSSHMPLAHLLEHIYSLSDYPTPISISTILFLALHLLSNILPSSFLLLMFKYFLKFSCLFCQCETRVVISKSLLGCSYFFDLCYSLSKYFPASLLSVVLFTSLXASNVFXLKSKAHWYHIQSSIMYSANLTYYHAHVXFCCFQSSVLIYLSRKLHSHPLPLE

SEQ ID NO: 430 - protein, 46 aa, Homo sapiens
  misc_feature (13): Xaa equals any of the naturally occurring L-amino acids
  misc_feature (18): Xaa equals any of the naturally occurring L-amino acids
TGSSNVVAVTQEXTQRKXTASNFYNFISDLTNQHSRLTAPTTRPTK

SEQ ID NO: 431 - protein, 60 aa, Homo sapiens
LLFVLDPVRVTLQCRWKESRTAERSSGPIFQDYCLLKTLESSENRFPSERGGRNKKKKKK

SEQ ID NO: 432 - protein, 114 aa, Homo sapiens
  misc_feature (55): Xaa equals any of the naturally occurring L-amino acids
  misc_feature (61): Xaa equals any of the naturally occurring L-amino acids
  misc_feature (95): Xaa equals any of the naturally occurring L-amino acids
ATAPSPNSTSFHDKNSTKLSLERTYLNIIKATYDRPTASIILQYSPVFSSNDFFXFFLRAXVSLCCLSWSAVAILAHCNLCFLGSSEHIWVIFVXLLDKVSPCIPGWSQTPGLK

SEQ ID NO: 433 - DNA, 315 bp, Homo sapiens
gctttccaaatagcatgtttaactcagacaaattccagtttcacagaggatatgagaaggaaaaaaaatccacagcaagaatacaacaaagaaggattcattttacattcgttctgattaagaatatctttcagtttatgataaaatcaacgataatattgttaaaaactgacctaattactttcaaccagatactgtccaaacattaactttttccatcaaaagtatccctgatagttactttgtaaaatgaaagcacatttggcttccatttctgaggtggttaaaataaaggctaccgggttggataactta

SEQ ID NO: 434 - DNA, 315 bp, Homo sapiens; identical to SEQ ID NO: 433

SEQ ID NO: 435 - DNA, 324 bp, Homo sapiens
tactcaaagaaatgctaaagaggccggccgcggtggctcacgcctgtaatcccagcactttgggaggccgaggcaggcggatcacgaggtcaggagatcgagaccatcctggctaacacggtgaaaccccgtctctactaaaaatacagaaaattagccgggtgtagtggcgggtgcctgtagtcccagctacttgggaggctaaggcaggagaatggcatgaacccgggaggcggagcttgcagtgagccacgatcgcgccactgcactccagcctgggcaacagagggagactccgtctcaaaaaaaaaaaaaaaaaaaatg

SEQ ID NO: 436 - DNA, 148 bp, Homo sapiens
aggttcaagcaattctcctgcctcagcctcccgagtagctgggattacaggcatgtgccaccatgcccagctaattttgtatttttagtaaagacggggtttctccatgttgctcaggctggtctcgaactcctaacctcaggtgatc

SEQ ID NO: 437 - DNA, 148 bp, Homo sapiens; identical to SEQ ID NO: 436

SEQ ID NO: 438 - DNA, 283 bp, Homo sapiens
ccggccgcggtggctcacgcctgtaatcccagcactttgggaggccgaggcaggcggatcacgaggtcaggagatcgagaccatcctggctaacacggtgaaaccccgtctctactaaaaatacagaaaattagccgggtgtagtggcgggtgcctgtagtcccagctacttgggagtctaaggcaggagaaatggcatgaacccgggaggcggagcttgcagtgagtccacgatcgcgcctactgcactccagcctggtgcaacagagggagactccgtctc

SEQ ID NO: 439 - DNA, 554 bp, Homo sapiens
attttatttaaaaaaaaaaactgagatacagagggggaaaatgattttctgagggcattagagataaagccatagtcaaacagatcaaggccccagatccagagtcatttctaatacaccacacactgcctccaaagttttttcatttcaattgttaaattatctcagaaagaaaaaaataatacattaaaggatgcagtatgatcatatgatgagcttcttttctacgtaactttatattgctgttgtaaccttggttttaaaaaaagttaaagctctctctttcctgattattattagatttttgtgttcatgaatgttttgaaaaattaataactaagacactgaattgagatgttttaaacaaattttattaaatgaaatatttacagtccatccaaatggatatttgtaattaaaaaaaaatgcaacatttaaggaacctcaacaagtcttcaaaaaatttagtttgggtttgggctgaatatattactggatggcttttggcttaaaaattgctgtatgcagaagttggggagggaggctgaacaaaa

SEQ ID NO: 440 - DNA, 920 bp, Homo sapiens
atccaacctcaaaacacagtttaatcagtctttccttcacccactcactaaacaatctatttcctaagggcctctttcatgggtggcttgttcaccgtttgtgttgacatattgttattgccaaagttcatctgtatcaagaagtctttcaaaaataagcatattccttgtcaggtcttctcattggttaacactaatacagaggaacccttggatctcaaacaaatgctttttaatgagtttgaaattcttctgaaaacagttatcttttccccttgaatgcaatgaatgaatcatccttgttatccatccagtcctgactatatttggagaaatacatgaaaattgtacaatttcctcagaaaactgggcattcataataaaaaggaatagtataacaggttgagtcattttatgagaatatgttattttgtgactcttaaatctttatttaaagaagtgcattgaatacaatatcaaatatagtcagttcataattacagtagaactacattttataatacatctttcacatggttctcaggaacacattcctctaccaaaactcaattgcactcacttttggacaagcctgtgctcaggaaaggagaaatggttgtttaccatcaactttatagaaactgtcaaactaactgaagaaaagttttgctccattaagaaaatgcacctccctcaggagatcgagaccatcctggctaccatggtgaaaccccatctctactaaaaataccaaaaattagccgggcgtggtgacaggcacctgtagtcccagctactcgggaggctgaggcaggagaaaggcgtgaacccgggaggcggagcttgcagtgagccgagatcgcaccactgcactccagcctgggcgacagagcaattctctatctcaaaaaaaaaaaaaa

SEQ ID NO: 441 - DNA, 741 bp, Homo sapiens
gcggtggctcacgcctgtaatcccagcactttgggaggcctaggcgggccgatcacttgaggccaggatttgtgaccaacctgggcaacatggtgaaaccctgtctctactaaaaaaaaaaaaaatagctgggtgtggtggtgagcgcctataatctcagctactcaggaggctgaggcactcgcttgaatctgggaggtggaggttgcagtgagccgagattgtacgcattccagcttgggcagcagaacgagactctgtctcaaaaaaaaaaaaaaagccacgtaggaaattatccacagcatcaattggacttgatcttggctcagggaccaggcccggtgccttgatattggtagatttatttgccatcagactaatgagctggggacattgactgtttcctggcaactgagtcctctgattgtgtaaacaatttgcctgcaaacaaaacctgagtgcttgaaagggtaagtgatcctgatctgccatagaaaccttcatgcttagggagtttccctagctaattcctcagctaagattctccccaggagtttcactcacctgtttccagtgcctcctttgggctgtcagcatctgtgattccacattccccagagggagattcctccccaaagctggttgtatttactgccagtcctgggctgtagccagggcagtctttgaacacattatcaagaatactttttaaaataaaagtctgtttcgacttccactgtg

SEQ ID NO: 442 - DNA, 252 bp, Homo sapiens
aaacgtttattgagatattttgcctttttttttttttttttttgcaacttcttccaggaaggcactaatttttaaaatagggtatttactggccgggcgcagtggctcacacctgtaatcccagcactttggataggccgaggtgggcggatcacgaggtcaagagattgggatcatcctggccaatatggtgaaaccttgtctctactaaaaacacaaaaattagctgggaatagtgatgtgcgcctgtag

SEQ ID NO: 443 - DNA, 313 bp, Homo sapiens
gcagttcctacttttagacgcatggtggcgctagggtctcctccggccctgctagcaatctctaaggcacctccgccgccacctgcagtctcaaccaaacctctgggtgggcagcgcgggatgtgacgggccgagcgtccaatcgactgacagatttccgtccacactactgctctagccaatgggagccgaggagaggcgcggaggagcgcgggccccgcggcaagcctggcagaggcgcgaggccctcctcccgcctctccgcctactccagcctccgccgcctcagcttcccgagcgagccctgcggccg

SEQ ID NO: 444 - DNA, 326 bp, Homo sapiens
gattttccccaccccaatgttgacatgtactactcgacgctgtcatattattgaggcataaaagatgttctaataaaatggaagtgacttaagagaaagttttatgcctcctcccaactctgaacagatgctgagaatataccaaacaagttcacacaggagtagagatttagagaggccttcccaccttcaagaattttataatacgttaatgagctgagtcttattttcaaggatggctttgttaaagcagaagaagggtaactatgcttatgaaaggcagttttgcatgcctgtttgtcaaaaaatacagtacaatttatttt

SEQ ID NO: 445 - DNA, 173 bp, Homo sapiens
  misc_feature (90): n equals a,t,g, or c
cgttagcgaggtgccgccggcttccattcaggtcgaggtggcccggctccatgcaccgcgacgcaacgcggggaggcagacaacgtatanggcggcgcctacaatccatgccaacccgttccatgtgctcgccgaggcggcatatatcgccgtgacgatcagcggtccaatga

SEQ ID NO: 446 - DNA, 292 bp, Homo sapiens
cgttagcgaggtgccgccggcttccattcaggtcgaggtggcccggctccatgcaccgcgacgcaacgcggggaggcagacaaggtatagggcggcgctacaatccatgccaacccgttccatgtgctcgccgaggcggcataaatcgccgtgacgatcagcggtccaatgatcgaagttaggctggtaagagccgcgagcaatccttgaagctgtccctgatggtcgtcatctacctgcctggacagcatggcctgcaacgcgcgatcccgatgcgccggaagcgagaaga

SEQ ID NO: 447 - DNA, 994 bp, Homo sapiens
  misc_feature (207): n equals a,t,g, or c
  misc_feature (382): n equals a,t,g, or c
  misc_feature (413): n equals a,t,g, or c
  misc_feature (422): n equals a,t,g, or c
  misc_feature (449): n equals a,t,g, or c
  misc_feature (474): n equals a,t,g, or c
  misc_feature (476): n equals a,t,g, or c
  misc_feature (517): n equals a,t,g, or c
  misc_feature (536): n equals a,t,g, or c
  misc_feature (538): n equals a,t,g, or c
  misc_feature (541): n equals a,t,g, or c
  misc_feature (557): n equals a,t,g, or c
  misc_feature (558): n equals a,t,g, or c
  misc_feature (560): n equals a,t,g, or c
  misc_feature (565): n equals a,t,g, or c
  misc_feature (566): n equals a,t,g, or c
  misc_feature (569): n equals a,t,g, or c
  misc_feature (573): n equals a,t,g, or c
  misc_feature (579): n equals a,t,g, or c
  misc_feature (589): n equals a,t,g, or c
  misc_feature (596): n equals a,t,g, or c
  misc_feature (598): n equals a,t,g, or c
  misc_feature (615): n equals a,t,g, or c
  misc_feature (625): n equals a,t,g, or c
  misc_feature (980): n equals a,t,g, or c
  misc_feature (990): n equals a,t,g, or c
actgtacgaaacacggaaaccgaagaccattcatgtagttgctcaggtcgcagacgttttgcagcagcagtcgcttcacgttcgctcgcgtatcggtgattcattctgctaaccagtaaggcaaccctgccagcctagccgggtcctcaacgacaggagcacgatcatgcgcacccgtggccaggacccaacgctgcccgagatgcnccgcgtgcggctgctggagatggcggacgcgatggatatgttctgccaagggttggtttgcgcattcacagttctccgcaagaattgattggctccaattcttggagtggtgaatccgttagcgaggtgccgccggcttccattcaggtcgaggtggcccggctccatgcaccgngacgcaacgcggggaggcagacaaggtatanggcggcgcntacaatccatgccaacccgttccatgngctcgccgaggcggcataaatcgcngngacgatcagcggtccaatgatcgaagttaggctggtaaganccgcgagcgatccttgaancngtncctgatggtcgtcatnnanctgcnnggnacancatggnctgcaacgcnggcatcncnatgccgccggaagcganaagaatcatnatggggaaggccatccagcctcgcgtcgcgaacgccagcaagacgtagcccagcgcgtcggccgccatgccggcgataatggcctgcttctcgccgaaacgtttggtggcgggaccagtgacgaaggcttgagcgagggcgtgcaagaatccgaataccgcaagcgacaggccgatcatcgtcgcgctccagcgaaagcggtcctcgccgaaaatgacccagagcgctgccggcacctgtcctacgagttgcatgataaagaagacagtcataagtgcggcgacgatagtcatgccccgcgcccaccggaaggagctgactgggttgaaggctctcaagggcatcggtcgagctngacattgtangact

SEQ ID NO: 448 - DNA, 245 bp, Homo sapiens
caggaaaccccaattacacggtaaggcctttctcagaatgggtgagatggattagaggagggaggtgagagccctttcatgtttacttagcaccctagaaagacctggaggaggtgctttaaacctgagatatacaaaataagtagtcaatgaagaagcttccatttgcctcaatggaagacctcctctctgcagtgtctgccccatccaacaggaatggtatctctggcaagtgcctcaaatcc

SEQ ID NO: 449 - DNA, 245 bp, Homo sapiens; identical to SEQ ID NO: 448

SEQ ID NO: 450 - DNA, 667 bp, Homo sapiens
tttttttctaaaatattataaatttagaaaaattttgcaaacagaaaacactgtagggacaatatatgataagtaaattgtacttcagcaactcattgctttttagataccactgaattatttgcactaatggaggaacattgttataccaacctatttatatttgatccacattttaagattcctgttcagcttatttactttcttacttatgtcttatctggattcttattaacgttagttctcccttacttgcttggaggagaaatcattagaaacatgctgagaactgggagatggccacttcaagtttaaatttgctatgaagaagctaccaataaccttctttcagtctaaattaaggtggcctgtagttttacaacccaaagcatgattgtgggatgctaatttagggaactattctgcagaaaccatgacacaatcagcttgctggtccgtatttagaaccatacttggaaattgtgctcaggtctgcaatttgtaattcatgggtaggggttgaatctagaggtggctgagagttcagccacaaaggtgataaaaggattgggaaagaactatgaaggaatttaaagaaactgggattagcttggaaagagaggaagataaagagcaatttaatcgcaatctttatgtacatagagaa

SEQ ID NO: 451 - DNA, 667 bp, Homo sapiens; identical to SEQ ID NO: 450

SEQ ID NO: 452 - DNA, 344 bp, Homo sapiens
tctccaatgccactcctctacaatgatagccagccacactggcgatctgttccacagaatctcatggttatgtcactcaaatgcctcatccaaagtctggcccatagagggtacacaactattttcctttctgccaattgcttactgtcttcttgcggatttgaggactgtggcttggataagcacttggatggtacaccagttaagatgaggaactgaacaaccatgaagggaaaagaaggtgggctgcggagagttcagtcacctgagcagttgtctagaaaactagttctaggagagaaattgaaatatgatctaacagaaaaaatcagtataaaagaatt

SEQ ID NO: 453 - DNA, 434 bp, Homo sapiens
atttttaaaaagtgctcaaagcatctatttttcatagctgtgcaaaagtaaaagaaataatattcatttttcacttcatgcaagaacctcacttgcatgaggttctcgaaatagaaaatcataatcaggacaacttgtcacttcttcagatgttttatatagaatatcatttggcttctaaatctgtgattccttttttgtctgtggctccagattttcataatctaccactattaagcagaagtggtaatttatgaagaaatttgggtttgaaatgcttattattttcatgaagataaaaagtaaaataagaatgttaaccatttgagtcctgttgctgaagggcattgagaggagttgagccccatctctctctcccattgcagtagttcctcttaaagtctcccttaccatcttaaaaaaaaaaaaaaaaa

SEQ ID NO: 454 - DNA, 434 bp, Homo sapiens; identical to SEQ ID NO: 453

SEQ ID NO: 455 - DNA, 143 bp, Homo sapiens
gacattctggagctaggtaatatccttaaatttatctttaccgttgtaaatacaactgtgtaattgagcttcatctgattgttttagagtcaccaagagactgcctctaatgaccctaagtggctctgtatgcatagaaaaat

SEQ ID NO: 456 - DNA, 143 bp, Homo sapiens; identical to SEQ ID NO: 455

SEQ ID NO: 457 - DNA, 538 bp, Homo sapiens
ttgctcatcttcgccacacggtggcggtcttatcacatgcttagtgcctgctcttttcctgcttgcgctcaaggcggtttcggaggggtagggtatgccgtttgtcccttgcaaatcccaggatgccctacatccagaaatctggccatgcaaggcaaagcccacattttgtcaccagccagcctgggttcaaatgccgtttaagagctgtgatcgtctctgggtctcttcagcagtaaaatgggactgcaaacccagatcaccatgcacgtggtaaaatttgtaggagataagttatgtgaagctcggggctgaggcccctgtgtagggcccagttcctagttcctaagacggcttcctcgagctgaaaggaacccagcccagtgtagtcttatggggaagagggtggggacccagtcttaagagcagaaccaagaatgagagcctgagctacgtgcagagtgcagagtccctgctgtgagctctgccccaccccaggctggaaaggttgcctgtctgcccctggggtgggagggtg

SEQ ID NO: 458 - DNA, 538 bp, Homo sapiens; identical to SEQ ID NO: 457

SEQ ID NO: 459 - DNA, 263 bp, Homo sapiens
ggcaggtattagcagcaaggcagggttcccaggggtgcagtttaatattgtgtgcgttcaggaaagtagttttgctactctatgccccaatttcctcctacagaacagggctaatatgctcatttaatccacagatccactattaatgctggtacccacctaataccctctaagggtcactcatctcccttggaatttaatctacactcctccccaaggcccctgctcagtctcccttgacatctgccctgttgtggttcact

SEQ ID NO: 460 - DNA, 5049 bp, Homo sapiens
ccgcgccgtgcacgtcttggttcgggccgggcataaaaggcttcgcggcccagggctcacttggcgctgagaacgcgggtccacgcgtgtgatcgtccgtgcgtctagcctttgcccacgcaggtatgaacacccggagtgcacctggcgggaggacccccttcaggctgctttggcccgatcctgactttagtgctggccgcctttgctttccatccgctatagtggcctcctttgtccttgcgggggaaaccgaggccacagccttgcagcgcaggcctgatcgcccgacttcccgccccctgctcgtgcgggcctcactgtctccttctgggctgggggcttgcgacaccgccctccggccgactcgctcgtggggtgctggtggcagtggctgggtcactcgtgctctggtcaggagagcgggtctccggcagcctccgggcctcgtagaccgggtacccgggagggtgagggttagtgctgtcgcctccgccgtgctgactcagtcatagggcccagcacgcagcgcgaccttgggttgggaggacaaagtgtcttcccgggcgcactgaccgggcgggggtctcagctttcagtcatggcctccggtaacgcgcgcatcggaaagccagcccctgacttcaaggccacagcggtggttgatggcgccttcaaagaggtgaagctgtcggactacaaaggtgagcgccgcccggagggggcccaggtagaagcggggccgtgcatgagagaagctgggccctaactcctctgtgtccctcctccccagggaagtacgtggtcctctttttctaccctctggacttcacttttgtgtgccccaccgagatcatcgcgttcagcaaccgtgcagaggacttccgcaagctgggctgtgaagtgctgggcgtctcggtggactctcagttcacccacctggcttggtatgagcaggggccaaagagggaggttgcagctaagctcacaccctcaggtcctagcagtgtggcttcgtggccattgctcaacctctggaacctgcgtttccccatcgtgaaaataatggaaacattgccgcccaagtctttaaggatgatgacagtaattagcatttgacaactagttgcctggtatatagagttgcagatgcaactcagatgcaactctatctactctatgtacttagttcccaggagggaggctgtgctgccctatttcatgaagatggaaactccagttcaccgaagtgaagggctgtaccccatgacacagctagaggaggatggggactcttaacacaggctctctgctgggtgatgctgcaagttacaagcacatgtgaagccacttagctggagctgtgcctctcaaactcagtcttcccagccatggggatacagtccttgcacccaacccagggtggggtgggtgaggctcccagcggcctactctaaagccccttatctccggcctccagtgcttatcacattgggcccacagggtgaggaccctgctgtgccaggcatcctgaggccccaactctgtctcccctactcccaggatcaacaccccccggaaagagggaggcttgggccccctgaacatccccctgcttgctgacgtgaccagacgcttgtctgaggattacggcgtgctgaaaacagatgagggcattgcctacaggtactgtgggaccctcagcccggctcagggagcgccctgccccccattcctgtgatgctgggaccactcctgtacaatgtcttctctgcccccagccctgtggctagcagcgggtggttggtagtcccttccttgtctctggcagtgggagctatcagctcctcactgggaaccctgatgtcttcaggggcctctttatcatcgatggcaagggtgtccttcgccagatcactgttaatgatttgcctgtgggacgctccgtggatgaggctctgcggctggtccaggccttccagtacacagacgagcatggggaaggtgagcagatacacacatgacacatgggtacatactgagcgcctccgtcactcatgcaaacattcactgcctgtcctcttacctgtccagatgggtgttagggccccaaagaagattcagctcagggctttgtctgcaggatgtttctaatgtggtaggagacaaataacgcctgacattcaaccaaggtggacaaaggggccgggctcagtggctcacggttgtattgccagcactttgggaagctgtggcaggtggatcacctgaggtcaggagttcgagaccagcctgaccaacatggtgaaaccccgtctctacgaagaacacaaaaaattagctggccgtggtggtgcacacttgtaatcccagctacttgagagactgaggcaggagttcgcttgaacccaggaggcagaggttgcagtgagctgagatcgcaccgttgtactccagcttgggcaacagagcaaaactcagtctcaaaaaaaaaaaaaattagcttggtttgtgaagcatgcctatagtcccagctactcaagaggctgaggctggaggatcacttgagcctgggaggtcaaggctgcagtaagctgtgatcgcaccactgcactccagcctgggtgacacagcaagaccctgtctcaaaaaaacaaacaaacaggccgagcgcggtggctcacgcctgtaatcccagcactttgggaggccgaggcgggcagatcatgaggtcaggagtttgagaccagcctggccaacatagtgaaaccgcgtctctgctaaaaatacaaaaaaattagctgggtgcggtggcaggtgcctgtaatcccagctacttgggaggctgaggcaggagactcccttgaacccgggaggaggttgcagtaagccgagatcacaccactgcactccagcctgggcgccagtgtgagactccatctcaaaaacaacaacaacaaaaaaacctgtaggggtggggcagagggacaaagatgggactaaaggagccaaaaagacaggaagatgctgtgtctcatgcctgtagatgctgtgtctcatgcctgtagttccacctactctggagagtgaggcagaagattgcttaggcccaggaatttgagtcgagcctaggcaacatagcaataccccatctctttttttttttttttaagagatggggtattggttaaaaaaaaaaaaaaaaaaaaagaggccagatgcagtggctcacacctgtaatcccagcattttgggaggcctaggtgggtggatcacctgaggtcgggagttcgagacaagcttgaccgacatggagaaacccagtctctactaaaaatacaaaattagcccagcctggtggtgcatgcctgtaatcccagctacttgggaggctgaggcaagagaatcgtttgaagctgagaggcggaggttgcagtgagctgagatcgtgccattgcactccagcctgggcaacgagtgaagcgaaactccgtctcaaaaaataaaaaaaaaaaagaggccgggcacggtggctcatgcctgtaatcccaccactttgggaggctgaggcgggcggatcaagaggtcaggagatcgagaccatcctagctaacgcggtgaaaccctgtctctactaaaaatacaaaaaaattagtcgggcgtggtggcgggcgcctgtagtcccagctactctggcggctgaggtaggagaatggcgtgaacctgggaggcggagcttgcagtgagcagagatcgtgccactgcactccagcctgggcaacagagcaagactccatcttaaaaaaaaagaaaagaaaaaaagaagaaaaaggagagctgggtggcaaaaagaaattgaagaattaagagtaggaaaaacaccagctagaaaatactgaacttggccaggtgtagtggctcacgcctgtaatcctagcattttgggaggccaaggtgggtggatcacctgaagtcaggagttcgagatcagcctgaccaatatggtgaaaccctgtctctgctaaaagtaccaaaaaattagcagggtgtggtggcgggcacttgtagtcccagctactcaggaggctaaggcaggagaatcacttgaacgcgggaggcagaggttgcaatgagccgagatcacgccattgcactccagcctgggcaacagaggaggactctgtctcaaaaaaaaaaaaaaaaaaagaaagaaagaaaaaagaagaaaagaaaaagagaaaatactgaacttggctaggcatggtggctcacacctgtaatcccagcactttgggaggccaagacgggcagatgacttgaggtcaggagttcgagacaagcgtgactaacatggtctctaccaaaaatacaaaaattagccaggcgtggtggtgcacctctgtaattccagctagggagtctggggcatgagaatcgcttgaacccaggagggagaggttgcatgagctcagatcatgctactgtacttcagcctgggcaacagagcaagactctgtctgaaaaaaaaaaaaaagaaaaaatactgaactgggcttggagggtttatcttaatatccacattcctgggcctggaccacttgcttccagcattttcttctgcaacacaggcccttgctttgcttcaccttgaacctggggctgtagccttcatgtgcatccttgtgtcttcccacagtttgtcccgctggctggaagcctggcagtgacacgattaagcccaacgtggatgacagcaaggaatatttctccaaacacaattaggctggctaacggatagtgagcttgtgcccctgcctaggtgcctgtgctgggtgtccacctgtgcccccacctgggtgccctatgctgacccaggaaaggccagacctgcccctccaaactccacagtatgggaccctggagggctaggccaaggccttctcatgcctccacctagaagctgaatagtgacgccctcccccaagcccacccagccgcacacaggcctagaggtaaccaataaagtattagggaaaggtgtgagtctgt

SEQ ID NO: 461 - DNA, 5049 bp, Homo sapiens
ccgcgccgtgcacgtcttggttcgggccgggcataaaaggcttcgcggcccagggctcacttggcgctgagaacgcgggtccacgcgtgtgatcgtccgtgcgtctagcctttgcccacgcaggtatgaacacccggagtgcacctggcgggaggacccccttcaggctgctttggcccgatcctgactttagtgctggccgcctttgctttccatccgctatagtggcctcctttgtccttgcgggggaaaccgaggccacagccttgcagcgcaggcctgatcgcccgacttcccgccccctgctcgtgcgggcctcactgtctccttctgggctgggggcttgcgacaccgccctccggccgactcgctcgtggggtgctggtggcagtggctgggtcactcgtgctctggtcaggagagcgggtctccggcagcctccgggcctcgtagaccgggtacccgggagggtgagggttagtgctgtcgcctccgccgtgctgactcagtcatagggcccagcacgcagcgcgaccttgggttgggaggacaaagtgtcttcccgggcgcactgaccgggcgggggtctcagctttcagtcatggcctccggtaacgcgcgcatcggaaagccagcccctgacttcaaggccacagcggtggttgatggcgccttcaaagaggtgaagctgtcggactacaaaggtgagcgccgcccggagggggcccaggtagaagcggggccgtgcatgagagaagctgggccctaactcctctgtgtccctcctccccagggaagtacgtggtcctctttttctaccctctggacttcacttttgtgtgccccaccgagatcatcgcgttcagcaaccgtgcagaggacttccgcaagctgggctgtgaagtgctgggcgtctcggtggactctcagttcacccacctggcttggtatgagcaggggccaaagagggaggttgcagctaagctcacaccctcaggtcctagcagtgtggcttcgtggccattgctcaacctctggaacctgcgtttccccatcgtgaaaataatggaaacattgccgcccaagtctttaaggatgatgacagtaattagcatttgacaactagttgcctggtatatagagttgcagatgcaactcagatgcaactctatctactctatgtacttagttcccaggagggaggctgtgctgccctatttcatgaagatggaaactccagttcaccgaagtgaagggctgtaccccatgacacagctagaggaggatggggactcttaacacaggctctctgctgggtgatgctgcaagttacaagtacatgtgaagccacttagctggagctgtgcctctcaaactcagtcttcccagccatggggatacagtccttgcacccaacccagggtggggtgggtgaggctcccagcggcctactctaaagccccttatctccggcctccagtgcttatcacattgggcccacagggtgaggaccctgctgtgccaggcatcctgaggccccaactctgtctcccctactcccaggatcaacaccccccggaaagagggaggcttgggccccctgaacatccccctgcttgctgacgtgaccagacgcttgtctgaggattacggcgtgctgaaaacagatgagggcattgcctacaggtactgtgggaccctcagcccggctcagggagcgccctgccccccattcctgtgatgctgggaccactcctgtacaatgtcttctctgcccccagccctgtggctagcagcgggtggttggtagtcccttccttgtctctggcagtgggagctatcagctcctcactgggaaccctgatgtcttcaggggcctctttatcatcgatggcaagggtgtccttcgccagatcactgttaatgatttgcctgtgggacgctccgtggatgaggctctgcggctggtccaggccttccagtacacagacgagcatggggaaggtgagcagatacacacatgacacatgggtacatactgagcgcctccgtcactcatgcaaacattcactgcctgtcctcttacctgtccagatgggtgttagggccccaaagaagattcagctcagggctttgtctgcaggatgtttctaatgtggtaggagacaaataacgcctgacattcaaccaaggtggacaaaggggccgggctcagtggctcacggttgtattgccagcactttgggaagctgtggcaggtggatcacctgaggtcaggagttcgagaccagcctgaccaacatggtgaaaccccgtctctacgaagaacacaaaaaattagctggccgtggtggtgcacacttgtaatcccagctacttgagagactgaggcaggagttcgcttgaacccaggaggcagaggttgcagtgagctgagatcgcaccgttgtactccagcttgggcaacagagcaaaactcagtctcaaaaaaaaaaaaaattagcttggtttgtgaagcatgcctatagtcccagctactcaagaggctgaggctggaggatcacttgagcctgggaggtcaaggctgcagtaagctgtgatcgcaccactgcactccagcctgggtgacacagcaagaccctgtctcaaaaaaacaaacaaacaggccgagcgcggtggctcacgcctgtaatcccagcactttgggaggccgaggcgggcagatcatgaggtcaggagtttgagaccagcctggccaacatagtgaaaccgcgtctctgctaaaaatacaaaaaaattagctgggtgcggtggcaggtgcctgtaatcccagctacttgggaggctgaggcaggagactcccttgaacccgggaggaggttgcagtaagccgagatcacaccactgcactccagcctgggcgccagtgtgagactccatctcaaaaacaacaacaacaaaaaaacctgtaggggtggggcagagggacaaagatgggactaaaggagccaaaaagacaggaagatgctgtgtctcatgcctgtagatgctgtgtctcatgcctgtagttccacctactctggagagtgaggcagaagattgcttaggcccaggaatttgagtcgagcctaggcaacatagcaataccccatctctttttttttttttttaagagatggggtattggttaaaaaaaaaaaaaaaaaaaaagaggccagatgcagtggctcacacctgtaatcccagcattttgggaggcctaggtgggtggatcacctgaggtcgggagttcgagacaagcttgaccgacatggagaaacccagtctctactaaaaatacaaaattagcccagcctggtggtgcatgcctgtaatcccagctacttgggaggctgaggcaagagaatcgtttgaagctgagaggcggaggttgcagtgagctgagatcgtgccattgcactccagcctgggcaacgagtgaagcgaaactccgtctcaaaaaataaaaaaaaaaaagaggccgggcacggtggctcatgcctgtaatcccaccactttgggaggctgaggcgggcggatcaagaggtcaggagatcgagaccatcctagctaacgcggtgaaaccctgtctctactaaaaatacaaaaaaattagtcgggcgtggtggcgggcgcctgtagtcccagctactctggcggctgaggtaggagaatggcgtgaacctgggaggcggagcttgcagtgagcagagatcgtgccactgcactccagcctgggcaacagagcaagactccatcttaaaaaaaaagaaaagaaaaaaagaagaaaaaggagagctgggtggcaaaaagaaattgaagaattaagagtaggaaaaacaccagctagaaaatactgaacttggccaggtgtagtggctcacgcctgtaatcctagcattttgggaggccaaggtgggtggatcacctgaagtcaggagttcgagatcagcctgaccaatatggtgaaaccctgtctctgctaaaagtaccaaaaaattagcagggtgtggtggcgggcacttgtagtcccagctactcaggaggctaaggcaggagaatcacttgaacgcgggaggcagaggttgcaatgagccgagatcacgccattgcactccagcctgggcaacagaggaggactctgtctcaaaaaaaaaaaaaaaaaaagaaagaaagaaaaaagaagaaaagaaaaagagaaaatactgaacttggctaggcatggtggctcacacctgtaatcccagcactttgggaggccaagacgggcagatgacttgaggtcaggagttcgagacaagcgtgactaacatggtctctaccaaaaatacaaaaattagccaggcgtggtggtgcacctctgtaattccagctagggagtctggggcatgagaatcgcttgaacccaggagggagaggttgcatgagctcagatcatgctactgtacttcagcctgggcaacagagcaagactctgtctgaaaaaaaaaaaaaagaaaaaatactgaactgggcttggagggtttatcttaatatccacattcctgggcctggaccacttgcttccagcattttcttctgcaacacaggcccttgctttgcttcaccttgaacctggggctgtagccttcatgtgcatccttgtgtcttcccacagtttgtcccgctggctggaagcctggcagtgacacgattaagcccaacgtggatgacagcaaggaatatttctccaaacacaattaggctggctaacggatagtgagcttgtgcccctgcctaggtgcctgtgctgggtgtccacctgtgcccccacctgggtgccctatgctgacccaggaaaggccagacctgcccctccaaactccacagtatgggaccctggagggctaggccaaggccttctcatgcctccacctagaagctgaatagtgacgccctcccccaagcccacccagccgcacacaggcctagaggtaaccaataaagtattagggaaaggtgtgagtctgt

SEQ ID NO: 462 - DNA, 263 bp, Homo sapiens; identical to SEQ ID NO: 459

SEQ ID NO: 463 - DNA, 4124 bp, Homo sapiens
agaaaaaataggagtttcacttaagaatgtccttgatgaagcaataaaaatctcagtccctcgggttcacatctttttaatattctgtgggacaagataggaagcacacataaattacttgtgctgtgtactagagaatgctggttgtcttgaggaaaaacacttccacaaatattagagtgaaaacaagtgaactagacagttttttcatggaatatcattttacttggtagactgacacacaatagttactcagactttggtgtttgacagacatttttttggaaatgaataacaagagcctgtcacttcaaggtaaacagttgacaacatttattgccaatgataaaatttgaactttcaagcaaaaatgcaaattttggaaaatgtgttatttctgccactgagaacataacagcataccaacacttttagactttttacttttatattgtataatgaaatgcatcaacatttggatgatctgtattacaggtgaaccaacattttccagtattagtggtggggaatgaccgtgtcatgaaggcttgaccaggatggggatagctcaaggaggcaggatggctcattgtttatgtcttcttcaggaacacaatgaagtaggttgagtttccaggatttggcccctgcattggggatggttggaagaaaagccaaaaaccatagcttcttcaagccagtggacttaaaaaacagtagtacttttaaagaaacaaggaattcaaggcaagagctgtttgtggggctaggggtaaagaaaaatgatggctttgccaaaatttgctaaatttatatcaggctgggtcctgatacacatttctaaaaatccaggcgaagcatggtggctcatgcctgtattcccagtactttgggaggacaaggcaggagggtcactaaggccagaagtttgagaacagcctaacaacacagcaagactgtctctacaaaaaaaaaaaaaaaaaaaaaaaaaaaaaaaaaaaaaaaaaaaatcagccaagtatggtggtgcatgcctgaagtctcagctactcaggagggatgaggattgtttgaggccaggagttggaggctgcaatgagctatgattgcacccctgtactccagcctgggcaatagagcaagaccctatctctgaaatatatacatacatattttttaatttttaaaaaattctttattgaatttttggaaaagaagctaaacatattaaagcttgtctacttgggggagacttttatggagtaagatacagagaaaccaattttccaatgtgatttttttctctccttacctgccttaataatcataatttccctttaaaaaaaatcttttgtggtactacaatttagtcctctctggcccactgaccttagtgtcagaacccctgatcttgtgcagagttgccctctcctcctcatcccagctgttttaccagggtcctagttcttctgttgttcctacacactacaaattttcttccttggtcttcaatactggcgtttgtatttgggaactcacgaacagatctctttggcttttaaactgctagaacttggccaacaccccactttgcctcaggaatttcctaataatggctcctttcaccatagcctctgacctaatttgttgttgttctttatttgcatgctcgtttttattgaatatgcagtagtataatttctctttcctattagtaatccactcctgccttctaaaaaccctagtcgggaaaaaatctgtggtttcctgagtacacagtcagctgtttcacaacaacagcctgtcacgtccttgaagacagtgctgaggtcagggatacaagaattgaggtagaaactggaatagaatatgcaatttttctgtgtgggcaattgggagagatgagaggctactgaaaggtacctgaggaggaatcaagagccaatgagattgagaggcctcttgtgtgagccactgtttctttgctataaagaaatacctgaggctgggtaatttataaagaaaagaggcttattgggctcacagttctgtagactgtataagaagcatggttccagcatcttcttttgtttttttttttgagttggagtctccctctattgcctaggctggagtgcagtggcactatctcagctcactgcaaccttcacctcctgggttccagtgattctcctgcctcagcctcctgagtaggtaggactacaggtgcccaccaccacacccggctagtttttttgtatttttagtagagatggggtttcaccatactggccaggctggtctcgaactcctgaccttgtgatctgcccgcctcggccttccaaagtgttgggattacaggcatgagccaccacacccagccagctccagcgtcttcttctggtgaaggcctcaggaagcttacaaccatggcggaaggtgaagagggagcaggcgtttcacagggtgagagagggagcaaaagagatgctatgttcctttgatcaaccagttctcatatgaactcattacaacagtgaaggcaccaagccattcatgaaggatctgccgccatgacccaagcccagcccactaagcccacctccaacattggaggtcacatttcaacatgagatttggaggggacacacatccaaatcatatcacctctcatggggaaggcaaagagagggtaagctggtggctagaaactaaaaacaaagatttgagaggagagagatgctacaggtgttggtacagttgtgtgggtgtgagcatcctggcacttccactcacttcccgtttactgtgagcagaattttctggatgggtgtggaaaagtcttcatccaagttgggtctgagcagaatcacagaggctcttggaaatggcccatgtggattttatgtagcctactcaactcttttttacatgaatgaagaagtctgtacttatttaaagtatctgacaattccaggttaggccggcaggtcctactctgcccagaacagggacctcgcccctggcccttatattaggaacttggtcctgtgcaggtcaggacactatcacatgagttctggagagcaaaagccaaagatggaactgaaggttagggagtgatacattttctgaattagagctcatgaacattaagatggttaaatatgaaaaatagaaattactgtctagaattaaaataaaaaaaatggcaagataacaaaagacttgtgaaaatgcctaacataggtgtaagttcaatataggctaaatgatgtcagtataaactggtggttttccaccaatttgtgaaattaaagtgtttttctcagcttgatatggatacacctgagacccccgcctatgtcctaaggagaagaaggcagaaataatgagaactgaggccttccctaccccctccctccacacacaaggtgggtcatacccctagcatcctcatacctacctctcagacctcaaggcttccctgccccactggagatggcttttcttccccagagtcctcacaacccctcctgggtgtcatgtgatctacttgaatgctgtcaggcactagctattgagcttgtgccaggaccagaggccccagatgtgatgaactaaaagaccactcttcctgtacctcaatgacatcacctgcggtgggtgcttttcagaaatgatcacaccctgtttctgatgtaggtcacccgcacgccttatactccactcaagggtggacatccaaggggcaatgggggtttggggattcgttagaacatgggcagggattctttttgctgaggtacaggtgcattctgaatggggaagacgctggcagggagtgagggtccgcacatttccgtggggagcggagttgcccctgtgggacagcctcctcctgcagcatgtaagccacccctccagctgaccaccagtctgacttccccaagcagtggatactgtgtctatactggaagtgtctgaaggagggtcctcagagcagcccatgatagggttgaggaatctttaatctgaaaggctacaatccagaagtcactccaggcagagatgaggtctcccctgaaagcagggccaccacctctttggctcagagattcctg

SEQ ID NO: 464 - DNA, 4119 bp, Homo sapiens
agaaaaaataggagtttcacttaagaatgtccttgatgaagcaataaaaatctcagtccctcgggttcacatctttttaatattctgtgggacaagataggaagcacacataaattacttgtgctgtgtactagagaatgctggttgtcttgaggaaaaacacttccacaaatattagagtgaaaacaagtgaactagacagttttttcatggaatatcattttacttggtagactgacacacaatagttactcagactttggtgtttgacagacatttttttggaaatgaataacaagagcctgtcacttcaaggtaaacagttgacaacatttattgccaatgataaaatttgaactttcaagcaaaaatgcaaattttggaaaatgtgttatttctgccactgagaacataacagcataccaacacttttagactttttacttttatattgtataatgaaatgcatcaacatttggatgatctgtattacaggtgaaccaacattttccagtattagtggtggggaatgaccgtgtcatgaaggcttgaccaggatggggatagctcaaggaggcaggatggctcattgtttatgtcttcttcaggaacacaatgaagtaggttgagtttccaggatttggcccctgcattggggatggttggaagaaaagccaaaaaccatagcttcttcaagccagtggacttaaaaaacagtagtacttttaaagaaacaaggaattcaaggcaagagctgtttgtggggctaggggtaaagaaaaatgatggctttgccaaaatttgctaaatttatatcaggctgggtcctgatacacatttctaaaaatccaggcgaagcatggtggctcatgcctgtattcccagtactttgggaggacaaggcaggagggtcactaaggccagaagtttgagaacagcctaacaacacagcaagactgtctctacaaaaaaaaaaaaaaaaaaaaaaaaaaaaaaaaaaaaaatcagccaagtatggtggtgcatgcctgaagtctcagctactcaggagggatgaggattgtttgaggccaggagttggaggctgcaatgagctatgattgggccactgtactccagcctggggcaatagagcaagaccctatctctgaaatatatacatacatattttttaatttttaaaaaattctttattgaatttttggaaaagaagctaaacatattaaagcttgtctacttgggggagacttttatggagtaagatacagagaaaccaattttccaatgtgatttttttctctccttacctgccttaataatcataatttccctttaaaaaaaatctttgtggtactacaatttagtcctctctggcccactgaccttagtggtcagaacccctgatcttgtgcagagttgccctctcctcctcatcccagctgttttaccagggtcctagttcttctgttgttcctacacactacaaattttcttccttggtcttcaatactggcgtttgtatttgggaactcacgaacagatctctttggcttttaaactgctagaacttggccaacaccccactttgcctcaggaatttcctaataatggctcctttcaccatagcctctgacctaatttgttgttgttctttatttgcatgctcgtttttattgaatatgcagtagtataatttctctttcctattagtaatccactcctgccttctaaaaaccctagtcgggaaaaaatctgtggtttcctgagtacacagtcagctgtttcacaacaacagcctgtcacgtccttgaagacagtgctgaggtcagggatacaagaattgaggtagaaactggaatagaatatgcaatttttctgtgtgggcaattgggagagatgagaggctactgaaaggtacctgaggaggaatcaagagccaatgagattgagaggcctcttgtgtgagccactgtttctttgctataaagaaatacctgaggctgggtaatttataaagaaaagaggcttattgggctcacagttctgtagactgtataagaagcatggttccagcatcttcttttgtttttttttttgagttggagtctccctctattgcctaggctggagtgcagtggcactatctcagctcactgcaaccttcacctcctgggttccagtgattctcctgcctcagcctcctgagtaggtaggactacaggtgcccaccaccacacccggctagtttttttgtatttttagtagagatggggtttcaccatactggccaggctggtctcgaactcctgaccttgtgatctgcccgcctcggccttccaaagtgttgggattacaggcatgagccaccacacccagccagctccagcgtcttcttctggtgaaggcctcaggaagcttacaaccatggcggaaggtgaagagggagcaggcgtttcacagggtgagagagggagcaaaagagatgctatgttcctttgatcaaccagttctcatatgaactcattacaacagtgaaggcaccaagccattcatgaaggatctgccgccatgacccaagcccagcccactaagcccacctccaacattggaggtcacatttcaacatgagatttggaggggacacacatccaaatcatatcacctctcatggggaaggcaaagagagggtaagctggtggctagaaactaaaaacaaagatttgagaggagagagatgctacaggtgttggtacagttgtgtgggtgtgagcatcctggcacttccactcacttcccgtttactgtgagcagaattttctggatgggtgtggaaaagtcttcatccaagttgggtctgagcagaatcacagaggctcttggaaatggcccatgtggattttatgtagcctactcaactcttttttacatgaatgaagaagtctgtacttatttaaagtatctgacaattccaggttaggccggcaggtcctactctgcccagaacagggacctcgcccctggcccttatattaggaacttggtcctgtgcaggtcaggacactatcacatgagttctggagagcaaaagccaaagatggaactgaaggttagggagtgatacattttctgaattagagctcatgaacattaagatggttaaatatgaaaaatagaaattactgtctagaattaaaataaaaaaaatggcaagataacaaaagacttgtgaaaatgcctaacataggtgtaagttcaatataggctaaatgatgtcagtataaactggtggttttccaccaatttgtgaaattaaagtgtttttctcagcttgatatggatacacctgagacccccgcctatgtcctaaggagaagaaggcagaaataatgagaactgaggccttccctaccccctccctccacacacaaggtgggtcatacccctagcatcctcatacctacctctcagacctcaaggcttccctgccccactggagatggcttttcttccccagagtcctcacaacccctcctgggtgtcatgtgatctacttgaatgctgtcaggcactagctattgagcttgtgccaggaccagaggccccagatgtgatgaactaaaagaccactcttcctgtaactcaatgacatcacctgcggtgggtgcttttcagaaatgatcacaccctgtttctgatgtaggtcacccgcacgccttatactccactcaagggtggacatccaaggggcaatgggggtttggggattcgttagaacatgggcagggattctttttgctgaggtacaggtgcattctgaatggggaagacgctggcagggagtgagggtccgcacatttccgtggggagcggagttgcccctgtgggacagcctcctcctgcagcatgtaagccacccctccagctgaccaccagtctgacttccccaggcagtggatactgtgtctatactggaagtgtctgaaggagggtcctcagagcagcccatgatagggttgaggaatctttaatctgaaaggctacaatccagaagtcactccaggcagagatgaggtctcccctgaaagcagggccaccacctctttggctcagagattcctg

SEQ ID NO: 465 - DNA, 667 bp, Homo sapiens
tggatggacacgtagtagatctataaatatatcaccctggactcaatccacagagtgatgaatgtgaaaggtggtttgcatgccactgcacaaacccatatgaaatactcatcttggacttttaatcaaaattgaattctgcaagtgttagcaatgtttttaagagcagtttttttagtatttaaattttttacctttattgggaagttatctgttaggataatacaatttaatgaaagaaaacaatagtaggagacttggaagctcctattcatatttggcagccctttggcttctctgagagggcatccacaaatgactttgctatggatacaatgctgtgttcaaagatgattttacggccgggcgcggtggctcacgcctgtaatcccagcactttgggaggccgaggcgggcggatcacgaggtcaggagatcgagaccatcctggctaacacagtgaaaccccgtctcctaaaaaacacaaaaaaattagccgggcgtgatggcgggcgcctgtagtcccagctacttgggaggctgaggcaggagaatggcgtgaacccgggaggcggagcttgcagtgagccgagatcccgccactgcactccagcctgggcgacagagcgagactccgtctcaaaaaaaaaaaaaaaaaagatgattt

SEQ ID NO: 466 - DNA, 522 bp, Homo sapiens
ggtggattgatagatggcatatgttggatctctgtcctgggcatggcaccatgcttagcatggcagaggatacagtgaggagtgaggcaaggtgctacctccaaggagtctgaagcgtagttgaaagatgagataaacagaacaatagtcagactgcaagacagaaatgaaatgtgccatggaggaggtgagaacagtaggctgcaggtgtccaaagcaggagtgcacctgttctggaagaatctaaatggtgttctttcaggaagtagcacatcagatggactcactgcgtctgaactgagtgtcacctagatagcactgaaaaatatctattcctaggctaggccctattcaaattaagtaaaagtctctaaagggaagagctttggaatagatttttttctgtatatattttttaaagattgccaggtgattcttttacgcagccattggtgcaaaccacaggttgaaacaacagtcagatattgataggtgtattctgggcagagggaattttagggg

SEQ ID NO: 467 - DNA, 667 bp, Homo sapiens; identical to SEQ ID NO: 465

SEQ ID NO: 468 - DNA, 401 bp, Homo sapiens
ggtggattgatagatggcatatgttggatctctgtcctgggcatggcaccatgcttagcatggcagaggatacagtgaggagtgaggcaaggtgctacctccaacggagtgctgaagcgttagttgtaaacgatgagataaacagaacaatagtcagactgcaagacagaaatgaaatgtgccatggaggaggtgagaacagtaggctgcaggtgtccaaagcaggaccgcacctgttctggaagaatctaaatggtgttctttcggaatagcacatcagatggactcactgcgtctgaactgagtgtcacctagatagcactgaaaaatatctattcctaggctaggccctattcaaattaagtaaaagtctctaaagggaagagcttggaatagatttt

SEQ ID NO: 469 - DNA, 22299 bp, Homo sapiens
tcctaaggaaatcaagttgtttattagtcttgtgttcacccatgtcatgcatacgaagattgaagagctgaaaacgctttgatattctccactgtaaggcactgtgtgataccccgcttaaaactattcctaccattccaccaagggactttcctttccactgacaagttgaaggaggaattcagagacagtgcttccgtagccaaattgtttcattgttcaagtatattgatagggtggttgcctaagcagaaaatgcagaattaaacgaaggaagcttgttttgagagcaggtctgtcaccatctatggtacatatgacaaggaagtaaacaggaagtgctgaattggcttggtttactcctacagggacagagagaaataaaatcagtgtttaccaaatggaaaagcacaaagttggtacagagagaaatgttattttcaggcttctaaaaaggcattacaaataacacaaagtttcaaacctataattaaaaactatttttaaaaagttttgattaggttcccttcaaaaataggcattttaggctgaaataaattcttaaagttttgactcccacttatgctggtttttccataatccacactccataaatgcccctcttaaataacagatttcaggagtaaaaaatatgtcttaaagtcatctagtagaacttcaatgctcccacttaatagatgaggaatccaagaccccaaagttaaagcaatttctcaaacaccacacagccattaagggcagggagaatttaggatccaagttactcatcaggcaagagttacgaatagatataatttcttagtgccagatccacggaggaaacaaaccttgtggtgaaggggccaaatgtattgttggtgtagttttttccagaagccaagactgggcctgtgggtccaaaccgagtgtacttctgtccttcagcagctctggacaagagctaaataccatctaaatgcctgactccagaatcatgagaaataaaaaaaataatgttgccttaaagccactaacgtttggggtgggtttgttacacagcaaaagataactgaaacagaaataggcaggatcaccccatgaggcaaggaagcacatcagctgagttgtttactaagggcaaaggcgatatggactggctaacagaagacggaagttataaatactagcaaggaccattggaccagttacagaaatgatgacagtagtggttgtaagtatttctttcttactttaatatgaatacagcatttttttggtattaattttctttactcccccacttccattccctatctttaatagaagatgtgttaatagtggctagccatatagctcagtatttaagttacaggatattaaagagggagtgtgactcagagaaaagaggaaaaaatatcaccccaaaatggatgtgtcatataggacttaatagccttttactaaaaaaaaaaaaaaaaatgcacttttggcggggcatggtggctcacgcctgtaatcccagcactttgggaggctgaggcaggtggatcacgaggtcaggagattgagaccatcctggccaacatggtgaaactccgtctccattaaaaatacaaaaattagccaggcctggtggcacatgcctgtagtcccagctacttgggaggctgaggcaagagaatcacttgaacctgggaggcggaggctgcagtgagctgagatcgtgccactgcactccagcctggatgacagagcgagagactccatctcaaaaaaaaaaaaaatttatattagaacagttttacatttactgaattgtgaagacagcacaaagttcccatatacccaacacctactttcctctattattagtaatttacattatgatacatttgtcacaattaatgaacaaatattggtatgttatttcctaaagcccatacttgattcggatttccttagtttttatccattgtcccgtttctgctccagaattgcatccaggatgccacattacatttatgtcatgtctccttaggctcctcttggctatgatagtttctcaggctttccttgacagttttgaggagtgtggtcaggtattctgtaatgcctctcaagtgacatttgtatgatgctcaagattagaaggggttatgggttattgggaagatgaccacaaaggtatttataccctttttggaggacagggttagcatgcatcatgttaggtggaagcattttgctgttgactttatttggaggttaaacatggttaaaagatgtatgtatgggtaccaagtagacaaaggttggatagactgcagtcattggtagtgtgccaacttggtgaaacttaaactactttcccattccctacagggttctgagttagagttggccaaaagggaaatgtatgcagatgtggaaggtggaaatgaagcagctattgatctttgaaggtcttgcaggtacagagaaggcacagaaatgctgacaggttctagcttgtcttcacattcttctactccacattcagttctgactgaagaggctgttgaccaacagtggctcccagcttatgccagacactcagtggtgggcctgccaaggtggcagttatacagaagcatggcttcctgcataccttctcataagccatcactttgcagccacttttggcacttggttgttctttgtttctcacattgatgggttggtcttttttttttttttctctgatcctccaacttccttcctatgctttcactttcctagttcttctcacaactgtataaggtctgattcctgtaatcctcatcccatagtacacagtggttctgattctgtgactgaaccctgactgataactcaaggtatgagagactgattttcaaactgcaaacaactacagaagctggaaaaaaaaatacaaatgcagttgtgtaatagttttctatgatgccgtaacaaattactacaaatttagtagcataaataccacaaatttattatcttacagttctataggccagaagtccagtataagtctcattagactaaaatcagtgttgtcagactatgtttttttctggaggctatagggaagaatctgtttcctgttcattcagattgttgggagaactcagtttctgtttcttcagtaccaaggtctccattttcgagccgtctgtaagctggggccattctaggaggccatcatattccttggctcgtggctcctttactctgtcttcaaagctagaacatcaagtcattttcatgttgcatctctcttacccattcttctgcttttaagagctcatgtgattagactggacccatgtggataatctaggataacctctccatcttaacttcctttgattagcaaccttcatgccatctgcaaccttatttcccttttgctatgtgatgtaacatattcacaggttctgagatttggatatggacatcttggggtaggggtacaaattatttgaagcatcagaaaaaatccagtgtggccaggacttgagagaataagataatggagaaaagtcaggttctctttttttctcacgaaatttgccaattaactgtgagatgaagtgaggccaaacagtctgggaattatggcagtatcactgggctggggaagcagaggttggagtttggggctgccaaggcagttgagggaccatgattccctgaccagaggaaactacagagaaataagtctataattctgcatgcaatttccccttgaagcatatgtcaactccaaagctgtacatatggtggggttgggggtgagagcagcagatggaaggctaaaaaggtgagcaaaaattccatcaatcttattgggttaggggttagatttcagagctcaccagggttgaaggggcctggtaaacaccataggctctcagctgagaccctagggatattttctaggaataaaggcaaagcagaaatagatcaaccttgatccaactgtaccccatctgcctgccagaaaattatatcctctctagaaaaaatcaccatccagagtttctttaagacaaggtcttgatctgtcatccaggttggagtgcagtggtgcaatcataactcacagcagcctcaaattcctgagcttaagggatcctcctgcctcagccttctgagtggctgggactactacaggcacatgccaccacgcccagttaatttttatttttgtagcgatggggtcttgctttgttgcccagggtggtcttgaaatcctgggctcaagagatcctcccccctaccttggcctcccaaagtggtgagattacaggggtgagccagtgtgcccagcccagagcgtctatatcttttgcatatatgatgtctggcattcagtaaaacactcataggcaaagcaggaggcactgaaaaccaagaggaaaaaaaaaaaaacagacaacagaaacattcccaagcaacccaaatattgaggtaataaagaagggactggaactggaattttttttttttcaaaaaagaatcaaatggtgatggtataattaaaaaaataaaaaaaatttaagaattcagtagatgagcttaatagaattttagaaggaaagttcaataaatacaagataggtcagtagaaaatattcatattgaagcagagagaaaaggaaataagaaatacagaaaagggtacagaagacatataatgtatggttaaaaaaataagtctgacatacatctaattgaaatcctagaagacataaagaaatatttgaagaaaagtggataggatctaaaaaaatcgatgaaaaatatccagccacagattcaagtagttctacaaattccaagaaagaaaaacaaagaaaactacatgtaggcatgtcatactacaactgttaaagaataaaaggaaaaacacctcaaaagcatccagagaaaagcaggcacattaccttcacaggggcaacaacaggctgacaaccaaaatgacagaggccaaaagagaaggaaataagtctgatgtgtgaaaaataatgcacattttataatgcaaaactttaggaaaagagaaatgtccaaaaataggatacaattgaaaacgaaccagccatcatagtaggaagaaatgtagtgacaggtctcccaacaggttatttaagggtatatgttcactgcttgaaccctaaaggccaggcagtgatccaagtccagggtgccccgcagaggagcaggtgtccctgagaatccaaacttcccagagagtatctgggaacataccaaggaaaacagtcccatcacacacacggtaggcaaagagccagaaaattagcttaaaagcagccttcgagatgggaggcagcgtggatctctagagttgttctgctgctgcccaggagttccctgtctgtaagtcttaataaactcatctactcaccaagctggacttgtccgaatcattctttggtttcttggcatcttcccagtttgggggtgggagcagtgttatagtctcaaaattttatttttactgttattttttttttagacagagtctcattttgttgcccaggctggagtgcagtggtgtgatctcaggtcactgcaacctctgccttccgggttcaagcaattctcctgcctcagcgtcctgaatagctgggattacaagtgtgcgtcaccacgcctggataatttttgtatttttagtagagatggggtttagccatgttggccaggctggtttcaaactcttggcctcaagtgatacacctgccttggcctcccaaagtgctgggattatagttgtgagccaccacgcccagcctcaaatttttttcataacagaaatactctgcagtcttaaaaaaaagtcatgagaaagtgttactataggttacaaagaagtatgtactttatgaacatattgtgtgtgtgtgtatgtgtgcatgtgtgtattaaaatgtcagtcacgtgtagtctcaacgttaaaggactatagctaattctaattgcattctttgtgcttttctgagtcttctgagttttttgtttgcaatgaatgaatattttaaaaataataaaaagggtggtaaagaacaagttaaagagttaaaatgacaaaaataagttaaaaccaagaaatacaagttagcatgttaaggagttatgatgaggataagattgtagatttaaatgtaaccatatcaatcattacattagatatagtctaaagagtgggattaaaaggcagagattgtaaaatgggttaaaaagcaacacctaactataggctatcagtgaaaaagatactttaaataaaagtaaaggatgaaaaaatatgtataatataagtactgaagaaagatgaagtagatttattaatatcagaccaagtacacttcagaacatgacatactgtcaggggtaaaaaggaaaattaagaatgctaaaggggacaattaatcaagaagacatgccattcctaaatgtgtgtatgtaactgagaacagaacttcaaaatatactaagcaaaacctaataaaactcaaaggagaaacagataagtctacaatattaattgaagacattaaccctcctttctcagtaattgattgtaaaaagtagaaaatcagtaagtatacagaagaactgaataacactgttaggttgatgcaaaagtaatcatggtttttgccattactatttcaaaggcaaaaaccgtgattacttttgcaccaacatatcaactaacttgacctaatatttatagaatactacatcaaagagcacaatacacaagttttcaagtgcatatgcacatgttctgggccataagcaaaccttagaaaacctaaaggaactgaaatcatacaaagtatgtattataaaattaaactaaaatttagtaacaggaagatatctaggacattctcaaacatttggaaacgaatcaacacatttctaaataagccatgagtcaaagagaaaatcagaaaggaaattagaaaatgttctgaattggatgaaaatgaaaacaaaacacattaaaggttgtgggatatagctaaagtagtgtttagagggaaactgaaaaggaagaataaacaaattgccaatcttaggaattaaaaagaggagtgtcactacagatcctacagacatttaaaggattataagataatttaatgaacaactttatgccaaaacttttgttaacttagataagggacaaataagagacaaactatcaaaactctctcaagaagaaatagataaccttatatctaatagataaccttatatctatctaagaaatagccttatatctaatattattcatagctaaaagctttcccacaaaaaaacacttcagaccctgatagcctccctggtgaattctacggaattttaacaacaacaacaaaaaacactaattctacagaaactcttccagaacatagaaaaggaagcagcaggcccaaactcattttatgagcctagcattagctgatataaaaaccagaaatgagacattacaaaaactccagatcaatacttttcatgagtacagatacaaaaatacctagcaaaatgttagcaaatcagatccatcaaaatgtcgccaggcacagtagctcaggcctataatcccagtactttgggaggccaaggtgggaagatcacttgaggccaggagatcgagaccagcctaggcaacaagcaagaccctgtcactacaaaataaaacaacaacaaaaaaaatgccaggcatggtgatgtgtgcttatacttctagctgtttgggaggctgaggcgagaagatggcttgagcccaggagttccaggttgcagtgagctatgatcatgccactgcactccagcttggactacagagtgagaccctgtctctttaaaaatacaaacacacaaatatatataaatatacacatacatattcacacacacacacacacatgcccacacacacggaggttaatacatcatgaccgaattgcatttatcccagtaatgaaagattagttcaacaagtaaaaatcaatcaacgtaatctatcactgggaaaaaaaaaaaaaactcattgtcttcaaggatgaagaaatccatttgataaaattcaacatccataaaaacactcggcaaaaaaggaataaaaggaaacttccttaatgtgataaaaagcatctaagaaaatcttagctaatttaatggggtaaaggctgaatgctttccccataaaatagggaaaaggacaggatgtccatttttaccactcctattcaatagtgtactggagatcctagtcactgcaataagacatgaagaagaaataaaaaccatacagattagaaagaaaaaaaattgtatttgcaaacaaaatgatcatctatgtagaaaatcccgaagaaactataactgcccccaccacctcagcaatctattagagctagtaagttcagcaaggttttagcataaaaagttaatatacaaaaatcaattttatttctctgtgaaataaaatgaataatgaataattggaaaatgaaaaaaatttaaatatttcttataacatcagccatgaaatatccatgcacgaacctaataaaatatgtactaggtttatattctgaaagctataaaacattgatgagaaaaatttaaaaagacctttataaatggagagctatatcatgttcattaattagaaggcttaatgttgctaaggtgtcagttctttccaaattaagctatacattgtaagcaatcccagtgaaaatttcagaaagtgttttgtagaaatatgaaaaagcaaagaatctaaaatatgcaaagcaattttgaaaaagaagagctgagaaactcttaagacctgatttcatgacttagtatagaagtcatagtaatcaagacaaccagcattagtatcaggataaacaaatagactaatggaacaaaacaggatgcaaagcagagcaatatttatatggtcaattaattttagacaagggtgtcaaggtaattcaacacagaaaggatagttttctcaacgagtggtattgaaactatctgacatccacatccatatgcaaaaaaaacaaaaaaatagaacctcaactcttatcttgtattaataccatatacaaagtcaaaataaatagaaaacctaaaagtaaaaattcaaaacttaaatatctaaaagaaaacataggagaaagaaagcctttgtgagcttgggttagatgaaggtttcttacataagacatacagtataagccataaaagaataaaaattgataactttgacttattcaaaattaaaaatatcagcttttccaagggcactttaggaaagaacaagctccagacttgaaagttttgaaaagcacatttctgataatagatctgtatctaaaagacataacacttatattgtaaagagacaaacaaccatgtttttaaggggcaaaagatgtgaataaacacttcaacaaagaaaaaatacagatggcaaatgaacacatggaaaatgcttaatatcattggtcatcagggaaatgcaggtaaagccacaatgagatatcactatgcacctactggaatggctaaaattaaagcaaaataaataagcaatacaccaaatgctggatcataccaaaagctagtgaagatatggagaaactagaaatctcatatttctggtgggagtgccatatggtacatctacattggaaaacattttggtagttttttataaaaataaatattcacttaccatgagtcagtaatcccacttctaggtatttacccaatacaaatgaacacgtgagtccacacaaagatctgtccatttgtgttcagagcaattttatttttaatagcaacgaaatggaaacaatgcaaatgtccactcaatagcgaatggatgaacaaattgtagtgcatccatatgatggaatattactcagcaataacatataatgaactaacacacgaaacaagatggataaatctcaaaagcataatgctaagtaaaaaagacacacaaaaatcttgaaattcaacttgatatggaattattgcatttaatatgccattctggaaaatataaaaaatgatagggacagaatgagtgttgccaggggttagtgatgaggcgggggaatcatgttacaaaggaacatgaaaaaactgttttgggttcttttatttttattgtgatggtgattacacaactgttcatttgtcagaagtcactaaattgtgctgtacatataaaaagggtttatacctatatgcaaactagatcagactaagcatttttttttttttaaagaaacatagataagagtggtgattcatgcctataatcgcagtactttgggaggctgaggcaggaggacagtttgaatccaggagtttgagataagcctgagcaacatagtgagaccctgtctctataaaaagaaaaaaaaaatgctgggcatggtggcatgtgctttgtagtcccaactactcaggaggctgaggtgggaggattgcttgagcccaggagctgtgatcatgccagtgtacttcagcctgggtgacagagtaagaccctgtatcaaaaaaaagaaaaaaggaaatatattgtttctatgtgccatatctaaagaacttctgcaacatatgaagtgataaataatacatgattttttaaataaaaatgctaacctggagctgtggtaaaaagaaaatttgagcaagtggtgaaacagatatatcaaaataggccaggtgcagtggctcatgcctgtaatcccaacactttgggaagacaaggtgggcggatcacttgagctcaggaattcaagaccagcctgggcaacgtggtgaaaccctgtctctaccaaaaaaatattagccgggcatggtggcatgcgcctgtggtcccagctactcaggaggctgaggtgggaggatcatttgagcccaggaggcaggggttgcggtgagccaggatcacgccactgtactccagcctaggtaacagagtgagaccccatctcaaaaagaaaaaaagatacatcaaataaaatttgacataatattactgaaacctaatgacatcacaactaatttctgcttgtagtggtcaaatttcttattttgttggagatgcactgtgatttaggaagtaccaaaatgcaaaaatgttttttaaaagagttatgttgaaaaacacagttgaagaagttcagaagtcttgggaaagtcaaggggaagctgaatgttgagatatgaagatgacgagccaggacagaagtgaaaaggaaaagctaaaggctggagaagaaccagagaagtataataacatgggtatagtgttgcaagaatttgcagaattaagtactgatcagtcattcattcatataatactgactcaacacgtattatgtgtcatgcactgttctaagtgctgggatatagcagtaggcaaaatagaccatgatccttaattgcagagtctacattctagagggagaacacagtaacaaaataaacagatctatgaaatggtattttagaagacagtaagtgttagagtgaaaaagaaagcaaggaaagggatatgatgtgctagagcaggggttggggtctcaatatttaaaagggtggtcagagaaggtcttatagagaaagtgatttatgtttttttgagacagggtctggctgtgttgcccaggttggagtgcaatggcactatcctagctcagtgctgccttgaactcctgggctcaagcgattctcctgcctcagccttcccattagctgggactacaggaatgtgccactgtgcctggctacttttttaattttttgtagaggcagggtcttgctctgttgcccaggctggtctccaattcttcgcctcaagcaatcctcccactttggccttctaaagttctgggattacaggtgtgagccactgtggcccggtctgagaaagtaacatgatatttcatgtatggcttgaagaaggtaaggtagccatgaggacagctttttacggtggatgcttctaaacaccgagtactcatggtatgcacagctaacatccatctacttcgttgagacccatttagcttccattgaaatgatattcaaatataccattaatgtgataattggttatgactgctgataaaaatgatttacaaaataatcttcatttcaactgagcaagaaaaatttgagatccaactgaaagaaaaccacatacctcactttatttttaactactactacccccctctctgaaacctgcccctctttcaattttcattatatgtgactttgggaatgctgaatttacttttttagtatcattagctgggaaagggggttagaaagagtgggaggaaatagcctatccatatgaaaacaataatcacataatatttattgtctgggattgaaatgtttcaaataggcaaagcaataaaatgtcaggaaaagcaaaacttcctaatgttaaaaatatcataaatttttcccaaaataagacatatgaaaaaagttccagtgatagtttatgtcaaaggaagaaaaaagccctcaaatccacgttaaagctgcctgaaatcttcagaaggcacaatctactcaccattggagaacgaggagacaatggcaattatgataaagtacagaaagcaacgattaccttttattgagcttgagaatcactttttaacataaactcactgatccctgcattctataacttggcttttgctatctattgttttttaaaaaaaggtagtgtcaaaaaactagcaggatttcagtatcacgttaaagtgattttacattttataattacaatgggacttatgtgtatatttattaataaaatagagtagcacctacatgggcaaaatatactttattgaatctacagataatttaatctaggtgggttcatgaacccctttctgtaatttcacggttcccctcaggctcactgtttggggcctgcagactacatgttgattgcttgattttcataggtgccaaataagatttctgaaggaatggctataaagaaaacagacattttaatttcaagctactctttggagtagcttccggttcacaaaatgttatttttagtctaaatagatctttatatttgctttaagttcagtggacatgttattccattacctttagggaaatttgatcctaaaaggctcattgtctttacagtgaaccagtgggagaactggtaggttttcaaagatggactatatacaaaaatagtcctactagtttgtaattctttttcaagattgtatagattcagatggaactcaaaggttcttaggtcttagtagtgcaaagtaatgcaaatatgattaaggtcatctgtttatgaggtccttaaccccttcacacaagactgatggcacagtgacctactcacaaaggccacaagaaacctgatgcatgcggtgctttaaattggtttttctgagacattgtatttgtctttaagagaaaagctgtgatcatctaaagttcataagctgtatagccaaataagtgaaataagaattgatgagattaaacaaagatttttaaaaaaggattctgagcttatgtttaaatgcatttttttttggctgggcatggtggctcacacctgtaattccagcactttgggaagctgaggcaggtggactactagaggtgaggagttcaagaccagcctttccaacatggtgaaaccctgtctctactaaaaatacaaaaatcagctggatgtggtggcgcatgcctgtaatcccagctactctggaggctgaggcaggagaattgcttgaacccgggaggcggaggttcctgtgagccacttcagcctgggcaatagaatgagactccgtttcaaaaaaaaaaaaaaaaaaattttttttctaccaaccaaaccacaaatgtttatgagtatctgtgtatatgagaatgacaaagaggtgttaattcaagacttgccctcaagaaattcttaatctggtgcagtctaaaggcacatggacagatgatcagggatactaaataggaagcagagagaacaacaagggcttagagttcagaggaagcaaagggtgctatgtgctgagacaggcaggaaactttatgggaaagagctagggaaggagaccaccatgaaaacctaggaaagaagaggcagattgattttgcatactgctaacagaaacacctgaccttctacacattgccatggaagggctcccaggagacctcatctccacataggccacgcagccctacctaggccatagggaccttcctctgtgattgtcacaggaacacagcaagacagccactcttgagaggagctgccacaggtagttttgcatctgactccctagttctggtaaggcaaaggtctttccacctcagccccctttgggatgtgaatgcaagctataaaactgcttggctggccaggcacggtggctcacgcctgtaatcccagcactttgggaggctgaggcgggtggatcgcccgaggtcaggagttcgagaccaacctggccaacatagtgaaaccccgtctctactaaaaatacaaaaaattagctgggcgtggtggcaggcgcctgtaatcccagctactcgggaggctgaggcaggagaatcgcttgaacctgggaggtggaggttgcagtgagctgagatcgagccattgcactccagcctgggcaacaagagtgaaactctgtctcaaaaacacaaaaaacaaaaccaaaaaactgcttggctgtggtttagagttggctcctccatgacatggtaaccccccagtcactcatgtcttctgtcaattggcccctctggcttggtatcttcctgtgggattaggaacgtgggaagttgacactgtgccgatcttgcttatgtagctgtgtaacagactgtctaaagccatttgggctcaccgtttccttacaggccaaacctatggaagtgtggcaagccaactcatgagctgcagtagttggtgctgcttagtgtctgcttgcttgactgactggtatgtttaggtcagggaggggtgacaagtggccaatgcattggcaggtgaactaactcttcccaagtgaagtagctggaagacacacttaaaaccattcagaaatagctgggtgaggtggcttgtgcctgtagtcccagctaatcaggaggctgaggtgggaggactgcttgcacctaggagttggagaccagcctcagtgatatagggagaccccatcttaaaaaaaaaattcagaaaagaaagttgtaccacaggctggtgcagttatttggaatcttaaaggacataaatcagaaggtggcttgtcctgaggcagaacaaacttagggttgaattaaagaagctgctgactgggtgtggtggctcatgcctataatcccagcattttgggaggccaaggtgggaggatcacttgagtccaagagtttgagatcagcctgggcaacaaagagagacctgactctctctctctgtaaaacaaagctgctgctaactactgagtggaatggaaaactatcctttgtaattcaaattgtgcatggtagctttttttccactttcctatttatttccatacaccacttcccccagacctgcctcacacacaaacatgtcaggctgggaaaaactatgactactatataattaatgaattaatgagcaagcctttaaaagggtcatttatttaaagtttcagggcattgccatatgtacttttgtatctgctgctgcaaacacgtaaacaagatgggaattattttataacatggatacataccttgtatgaaagcgtgaaacggtagcctgtaaacagagccttctggggaaatctggtcttcagaaaggagagaagctttgtatacatggatctttgaggaattttttcccataatttgtatagggactttttagtatattcattgattatatacatttatcttgaggcttaagacattattaaaaacttggcatgagcctatataattatattctattgtacatgatataatattctattatatacataatacttggcattagaggaggaatgttaagttaaaattttcttgcaatcaaattttctggttctgagaagtgcttctaggttcaaggtcaggcagcaattctctttaatatggtctcagaaatctctactccagtacagtccacgttgtgtaacagtggttaacagcatgagctttgggatcaaagtgctgggtacaaaagccagctctaccttgggtaattctgcataagacatttaatctgctgttcctcagtttcctctctcctgcctgtgggcaacagggcatatctggtagtggggctgtgagtattaaatgagataaatcgcacaaactgcttagtacacagggtagcacatggtgtgctgtaattattatgtcatagcttattaaaatgctgacacaatacatcatcatttttgatagcaagtagagtgttacctggtataagtaaaactatattttgatcatcttgagccttgcctccttctttttttcctatctatctatctttaccctcctttgaaaaaaatgagaatagtgaatattcagtagtgatgagcagaaaagggatcatgaacacaatgctgtacagataattacagtggctcccaacaatgaaatatgtatgcggcgttcttgtgactgcaggaattgattgctttaaaatatgcttcaattgccaaaacttccatgacttatgacagcttgactatttactatctatcttgctctggaaaacaaatgcaagtctcgtctctttctttaggtatcatggtatcagtatccgacttacaacatttgagactttctttaagagatacgactttctaatatttgagtttttaacgacatctggcccttatttaaccatcacatttacatccaattcctgcaggcaaagttttgttgtttaagcttggctagatgccctctgcagaaagcctttgctttaatgaacacaattccacaaaaactgctagagttccctgctctcttctcacccctgccactgtacaacaatagcatgtaaagtttcatcttgagtttcaaataagaaggtaaaaataagaaactgtgttgctggagaattagctctttgtagtggccactgctatgacatattcaacttgatgcccttagattatttgcagagtgtttatgtactatgaaatgttcggccagagcatacaggaaactgtaaaatattttatgagatgtatacatggttgatggtagaattttaaatgtagcctggaaaggttctatccaaattccaggggggcagatgagagaatatgttctctttagtgattcagttttacacaagaggttatatgaactggaaagcattgcctgatttgagaactacgtaaaaaaattcataaaattaaactttataattaattctaaacaagtaaacatgttttctttcagaccaagaatcaccagttatgtttatttgtcttctacatggtaaaagcatcagacatggcttgtttattattttataaaaacaaagaacagcaataaatgaagggttctccccagatacaggaattatatacaccatttaaaaaatatttgtgcttctgatggttttcaaataaaaagtcttggttttaaaattgaaacagtatttttgaatcacaacgattacaatctaagaaggcaggaaagctaatggcataaccctctaaatggcacgttcagaaagttatacttccaaatttaggtgaagggagaaatatttctactttctttacccttaaatctaggaagcagtatcaagagacgctatttatttattggcttatttattttcaaattcagtctctaaaatacaagggacaaaaaatagaaactagctttgtatatttccatttgacttagagttaagcctgatgtgtaagataacagactgtttacttaataccacagtcacactgaagattttactatataacacgtatgctttaggatgtatccataattagtacaggttttaaataaatttacatcgttgtctaggataaatatgccataaaaccccaacatgtcttagtaatattcttatgctaacccagtatggtagaaaatactgtataataccgactgaaaattagggaccatcgattctcatctctggtctgtcactacattattgagtgatcttaggaaactcactttccctctctaggccatggttttttcatttgcaagatgagcagctgttcttaatgatctctaagactatcttctgctctaacattatgattattgagaaaataatttactgaagttttcttaaacattccttctgtaaattttcttttgtttctatagtcactgctgaaggaagttttatttcacttcaaatttagtattgtgcaaagagtcagagaaagaacctaagtataaaaaatagaaaagggaattaaaaatattgagcaattatggggacatgtaggctggttcaggacagacataaatgaccttgctttattctaaattcagcttactggcttatgatgaaaaatgaaaggttttatatgaacttactgggcaaaaccagattttataaataattacctgtcagactgttcaagatagacaaacatatgccagaccaacaaaaacacagacctgtcatatttctgagagaaatgtacattgagtcttccttctctgggactataaggagatcaggtggaataaaacgaaggaaaaaaacccaaaccctatattttctgccttgtgcatactttaaaatgtataatgtgggagagaaggaattttgatgtgaaaaattatcccctgaaaattttataccatctataagcctggcagatcaaaaccaaatacaataaatgctatcgtttaaaagttaagttaagttaggatgtttactgcaagcttgtaattttccatgattatggatgccaaggaaaataagaatgataaaaagtttaatcataatcatacattttaacaagcatagatggaacatcaaaatcctttaggaatattttgatattatatatctatccgtgctttttgtttctgaaatgcaaattttttctaaaaagattaacatagagcaggtaaatgacagttaacaaatgtaaatgatgtggcataatcatattaactgagcctcataattctttgagtctgatggttttcaaataaaaagtcttgaatttaaaattgaaacagtgtttttgaatcgcaactattacaatataagaaggcaggaaagctaatgacataacctctaaatggcatgttcagaaagttttatacttccaaatttgggtgaagggagaactatttctactttctttacccttaaatctaggaagcagtatcaagagaggcttgctctcttgagcagtatcaagaaaaaggagcagtatcaagaaaaagatctttcatgtttctcatttctgtttttattaattctttagaaagagtgtttcaagtatgtgtaaaaaccataaaagtaaaattatacaaaactcccacagaattaaagaaataactttcttttttgcaattgaagtttaatcaggaactgtacaattacatctgctatattttggtttgttccaaagagttacggttcctcatttactggagaaagtatagatgccagaagggtagctcggctgctaacagcaagaaattacccagcccacatttccagtctaggtgtggtagtgctttgaagggaggaagcaagaaatcactctgctccccttctactgattctgaatacttggcttctaaatgtgtatggcatgtgcaggagtggtggatctggggattggaggaacaggaaaaggagggaaatgaagatggaggaagaggttctgtgtgaggaaaaacacacatgaaaggcagatggcaggaagttgggaagcaggcactgaaaatgacacatactataagtggagtgaaggggaaaggaggtgggaacaggtgatttatcaggtctgttagatctttgattactgtaagtttataaaatggatagctgtcactaaaatacatgtcaacaaatgttggaaagtaaagttggtggtgtaagggaaggcgaaaactcactgtccttttaattttgtttccttgttccaaacctggattataaaatatatcaaataaaatgcagacaaaacgctggacgggggcaaccactgcttttaaggtatgtgagctgagggcagtaaatctactcaaattaaaatttcaaaactgtgtgatctgcattcttgtccacctacagactatcctaaacatcctgccattaattagctgaacagcccatctagtaaacaagaccgatggttgaggggctggaaaagaggaggagtcagcaagttgaaagtcacaacagaccagcccactccctcagataaaagaaaggtaaatttgtattttattttgttcacaagaaatcaccttaatataacattgcctttcctgttgttgcaggcacatcacagttgtcacatcagcaggctagaaaagccatcccattcctgcggtaggcattctgtcaaagaaaaagaaatctgcaatgaattatcacatgaagtcaaacaaggaaaggaggcaaaaagcaagcagagccctcttcctgttttgtagactctgctggctacaatctaatagaatgcttaatctgaatatttctggtggcaaaactatagcaaccattctgtctattaaaaagtcagtgtggttaacaagtggttagtgattctatttttgggaagtagcagatacataaaataagacatcccattttgttaactgattgggcttggttaggccaaagagatgtattgaatctgtttgtcttttataaacatgtgttctctattcgatatgctcaggaatcacttctaactaactaagtatcttaatagtctataaattactgactcattactggcccttcccgggcctaatttatagtctgagtgaaaagctgtcggaacagacactaatagaggcctctcctcctccctaaaatatgatgatctcaaaggagttctgtatagttctgcatattgtagacagtatcaaaaatgcaaatcttatataattttatatacatacctgtacgtacagatgtacacatggatatgcatggtgggataaaatactcccataaaagaaaatgggaaaatggattctaagtgcaataattaatacgtttcagtaaagaaagaaaagttgcatgcttttcattccaagagacatattttgcatttcagtgttgggagacctggatcacacagggtctctgtaacatcctgaattccaccataagacccagaggggagcagaactaaaattcaggacttaggaataaaatttccctttccctggcacatttttaatcatttaaactagtaacagtcacatccagagaattcataaccgtcaatcttttcagaaaaacaaagaaaatcataaaattcaggttagggatttttcccccttaggctaataactctgaagcagttctggagtctgtatacttccagcccaatgaattaaccttgaacagccacagccatattttaagaaatacagaataaccttttacgatcaagataatgctatggaggcagtgaaatcttcatcttaaaaaataattaaaccacatttataattaattatactaaaaatggaaagtagacttaacccttttagaaagacttccatcaacatgaggtgaaacaaatatagttttctagataaccttctcttaatcataaaattcaattaacttgaaaaccttctctccaaatatcctgcttaagaagatttactgtgcttgtcaggctttggcgccctggctgaaatttctttggttagttatgctgctatgcagttcactccagatcagtgtatcagggatgacaaaacagtggcacattccaagtgtcattcctcagtgttctttctgtgagcttgttctttaccatggggctttttgtgttgtagaacacttctggattgaagaaaacattctaacaaggactagaaaattccaactctacttcctaaaattgcgctatagaacagtgttaagtgaatgcctcagagagccacaaataactt

SEQ ID NO: 470 - DNA, 495 bp, Homo sapiens
taaacaatgtatagagtctcattctaacccttgagtctgtggtcttgttttctacaatggtggctgctgagctgaggccccaaggaaggtgagaagccagccacactgagccaaagggctggcaacagtgactggagcaaggctggacatacaggattccctgtctttaactcctttaagtaaagtcaagggaaagcagagtttggtatccgactgatgcagactgttggcttttacttggcatgtactttcttactgcttgagaaatgttattttttccttaaacttctttctcattaatcttgtgttaagagtggtctaaccctgttagtttggtaggcagcttctgttccaattagcatatatttccataagtgttgagtggggaagggaaggaaaacgcagaatttctcaactattgaccttgagggacttgtaggaaggtgtgtctgacatgcttgtaatacaactgactctgaaaaagctctagtaaat

SEQ ID NO: 471 - DNA, 483 bp, Homo sapiens
tgctttttccttttgatgtacaaaggatgtacattgtctatgtagggcaattatgggaacgtcccaactttggcatgctttccagagtaagcaactttacaggaagatggatgaagacaacaactcatcttcacgtcaactgtaaatttctctctatttgtgttgcaaatgttgaaactaaatttaaacactgcttggtgtgagggccttccagaggccacattctcatggaatactttgtatcccacttactttcttctgtcagaccctatgaatgattcccagttctgtatctatctttacagacactcctagttagtaaaatccaggctttgaccagaaagagtcaggacttccacccactactgaaaattatagcttaatcaataacacaattagacctccccaacaaactggatcctacgtgcctatatactacttaaggttcatttctggtttaataaagctctgttctcaacatca

SEQ ID NO: 472 - DNA, 364 bp, Homo sapiens
catccgagcaatgctgccaaggggatgtttggtcttttaaattgtgatgacaaaataaacttttatgaaccctcttgctcaataaacacagcctggcattttaaatgtcagcacatctcaattttgtgagagggtctgcctgagaggattgacttgaaactacacagcaaagaggaggtgctagtccacatttgcgtgttccatttgcatgagcaaaatggacctgaagatggagctgcagcaagaggggaggcacatgtccaatagcaaggaagccatcaagaatcctttattcttgaaggggtatgcaacagactggaaaggatctcatttttctttgctttaaatgctttggtaaatgtaa

SEQ ID NO: 473 - DNA, 22756 bp, Homo sapiens
cccggagagagctggccgggatgaggcgccggctttcccgggtcttctccagctgccaccgctttactgcaaaactgacgggcgcaaaaacatgagtgactccgcgggagggcgcgctggtctccggcgttaccccaagctcccagtgtgggtggtggaggatcatcaggaggtgagcggacggcaacagggctctggggcagaatcagcggaagccctgacgctcagagggccaagcagagggcgcaaccttagcatcggaggccagagagttaaccagagttaaactgccctattccgttgctgtggagaggaccccaaaacagctaactaggaagaatgagaactgacatttatgggcgcttcctacgagtcggggcaacttatttacctcggtttgcccccaaatcccagaaccaaacaaaaggtggcatcgggattcgaaaccggacagtctggctgcagagccctgtgttcttaacctgcagttaactctggcttccaagtatctcctggaatcgccaccacagccctgctgtttagatgggaggctttatgcttggaacgtgggctctgatctgaaatggggacagtaatcgtaggactcacagggctcttaggagtattattgtgtgcatactgtgtttaaaaatcttttttttttcttttttgagacggagtctctctctgttacccagactggagtgcagtggcgcgatctcggctcactgcaacctccgcctcctgggttcgagcgattcttctgtctcagcctcctgagtagctgggatcacaggcacgcatcaccgtacccagctaatttttgtatttttagtagagacggggcttcgccacgttagccaggatggtctgaaagtctgacctcacgtgatcggcccccgccggcctcccaaagtgctgggattgcaggcgtgagctactgcgcacggcccatattgcgtaaaaaaaaaaaaaaatttaacacggtgccctgcatagataaacactaaaaggggtttccatgtttatggccgtgctgatttacagtagccaaattggtgtcttaatctagacttttccaagtcaacaaaggaggcccatggatctaataaatatgttttaaagtagcatcagtaggcttgggatgggaggcagttctctggacgttaaaaaagaagagggatttactgttggtgacagctaataggagaggaagataggtttctcaggacctggatatagtgtctatgaccttgagagaatgagaaagcctaggttagacggtgctttcaaattaggtattaaacctagaattagagaagatgtaagaggagaaatggcctttatagaccacctagcccaaccccaccattctaagtgtaccaaaaagaccctaaccagcctggacagcagagcgaaatcccatctctacaaaaatagaagtgaaaaaattagctgggcgtagtggtgcgtgcctgtaatcccagctactcaggagactgaggtgggaggatcgtgtgaacccaggagtccaaggctgcagtgagccatgatcacaccactgctttccaggctgggcaactgacaagcccctatccctttttaaaggaaaaaaaagaatactttgagacctagggtaccttgaacacctagttaatgttagaacaggcattaagcggtagtttgttcctgagccccagtcctggtctgtttccccacatgacctgttgagttcaagggggcagcaggaaggccgctggagatgcaggttggaagttctgaggacaaagtaatgcttgagattatcatctgcaccatctacagtaaacaaattttatgtttttccactttacagcaacatagtatgctttcaattatgtgcattatttagcattgtttttcagtctgcagttgagtgtgtgctcatggtttcagtgttaattcttattgtgtgcctgtgtcttttacaggttctaccctttatataccgggccataggctcaaagcatcttcctgccagtaatgtaagttttttacatttcgactcacatccagacctccttattcctgtgaatatgccagcagacaccgtgtttgataaggaaacactctttgggtaatatgtgattttatttatggtcttttgtgtttgaagtacaatttgcagtagataataagcaattataggaaatagactttgctaaactcatgggtttgggggttttttgtttgtctttttgtctttttcattttatttagaacaagtgttgacaactttcttaaagagccagattagcaaatattttaggtttgctggctatatggtctctgttgcaactattaatctttgcctttgtagtgtgaaagcaatcacaagcactgtgtaaacaaatgacagtagctgtgttccaataaagctttatttacaagctgggcatggtggatgagcctgtagtcccagctactcaggaagctaaggtgggaagatcacttgaggccagcagttccaggctgtgatcaaagcctgtggatagctgctgcactccagactgggcaacataaccagaccccatctcttaaaagaaacaaaccaaaaaaactttgtttacaaaaacagcctagccaatgtttaatccttttaatatttgcctttatagagaccattggattctcacgtctatttctgcatttagtccattgccatatgctgttttggttgaaatatatgatgaagattcaggctttcacaggcatgtaattggaaaaggaaagaatattttgatagcctttttagataattgtgaatattctttgatagtgcgccaaaacttgaaaagtagtagtttattaaagcttatttgaaatgtagaattcagcaattcagtatcaagtgtgaataaccatagtttcttgaccactcctttcaagataaatggtgttcacctcaaagttcaatcacaagtgcttttccttgagacaactgttatgcttcaaactatgtagcaggagagctttctgtgcatttctcattttgccacacataatatttaaaaatgtatactcaggatggaaatttaataaaatcaagatgttctcgaatgacacttttatatttatttatttatttattttggcagtggttggtaatgaagaatatagtaactactaacagtttggtgctgctgccttaattaatgttggaacatcaacccaccagtgcctttgcaccatctttgcaaatgtcagtaaatgaaaacaggaaataatgccttagtattttcatgaaaatagttttgtaatagtgatgtccctgaaaaagtctcaggaaccactctagggaccacactttgagacctgtggtcttaaaatgttgtggataaaattacacttgggaaaaaataaaaataaaagttttaatgttgtctctatgtttcttttccagagaattaagtattgaaaattggattatgcctgcagtttatgctggccatttttcacatgtaatatggtttcatcccacatgggctcagcagatcagagagggcagacaccactttttagtaggcaaagacacttctaccacaacaatcaggtaatttcctcatatttgtgaatatggaagtgattgaatgtttctatcttattttggattcctataataacttcataagtctctgcacacaaatagggtcagattaagcctcgacttctccaaagagttctcaaaacacgaagaacaaacttttaagtctcttgatattcttcatgtaccatttatatttagttgctggtcaaattagattttgaatgtgatcattatcctccggaatttgggcttcattggtgattaactccttaagccattgaagtatcttatagatttatacattcagtagtacattttactgtttcctgtcagtataactgttgtctgctgaatttgccgcagtggctcacgcctgtaatcccagcactttgggaggccgaggtgggcagaagacgaggtcaagagatcgagatcatcctggctaacatggtgaaacaccgtctctactaaaaatacaaaaacaaattagccgggcgtggtggcaggcgcctgtagtcccagctactcaggaggctgaggcaggagaatggcgtgaacccaggagacagagcttgcagtgagctgagatcgtgccactgtactccagcctgggcaacagagtgagactctgtctcaaaaacaaaacaaaaaacaaacaaacaaaaaaacagtaattagcagtgaaagggcaaaattatctcactttgatttttttataaatccaactgctgaataagtagatttggggctttaattttctttataatataattagtttcagataagtacttaatctaaagtaaattacagtatcctctgacttgagataaatatgcaactgtttttattgtataagctatttaacaatgttttgtgtatcttgtgatactataatactttcagaaatatcaatatgttcttgactttaaaattctcttgtgatgggataaatattttaaacagtatagccataactttctagaaccttaaggataatggagtgaaatggtaatacgttgaaaatcagatagtcttcctcattgaaaatgatactttatttctaatttattcttaatgatacaattaacttttgtagtatataatcttgtcgtttgcacaaatagctttgttgtgatatatgaaaattgtatttatttcagatataattcaaaagaaataattaagactcagcatataaatattgtacatactactggtatatgtgaaatagtagtagggtttttattgagtacttcagtgagtaggcctgatttaacctacaaaatcaaataattttcagcaatctgacacagacatttgaaactccacgtgtgattaacaattttggaagattttgattcatgactttggttaatcctgcaagtaaaaatgtatggaagagacacatatacatgttggtgtgcagtttgacaaatacttgcatgtttgtatgataggaacatgggagaactgctgttattaaaaagaatattaatttaggttgggggatacagcttcatcttagggttgtacagttttaataagcttggacattagttttactatgtcattaatctatttttggaaaatagcttttacagtttatagctgtgtatgctgggagaggtcaagtgggaaataaatattaaccatgattttaggtgggtaaggcatgcctctagaagaagtatttggcttcactgtttgaagtatttaccaagtcacctttcatactgagaatattatggttatatagaaattaacaaagctctaaaatatgtcagggggagtttctattaagagaaattatttccagatgaaatttttctcttcaatgattttttggataaagattcagctggtatgagagagaacaaaggaacactggcttaaacaagagagtttattcttatattagaattcactgtacacaaaccaggcctatgtggcagctctagagtttggggaaccctagttccttctacctttttgcaccaccgtctctagaatattgcccctgtccttatagtccagggtggcttgccacctctgtgttcatatgccagtcagcagggaacaggagaacaaagctctgcatgcttttcttccattcacaaccaccggccttaatttaatcacatggccacaccaggctgcaaggcagactgaaatgtagtctttatatggggcagctgtgtgtccagctaagaatttgaggaatgctatttctacagaagaacaggaagtataaatactagagactgctctcagtttttgtcaaataggtccgttcttatatttctgccataccatagtgaaatgtcaactgatttgcccattcttcttaaaaatcgttttttcctctgattcagggttacaagtacagatcattatttcctaagtgatggtctgtatgtacctgaagaccagctagagaaccaaaaacctttacaattggatgtaattatggtaaaaccttataaactctgtaacaatcaagaagaaaacgatgcagtgtcttctgctaagaaaccaaagctagccctggaagattcggaaaacactgcctctactaactgtgactcttcttcagaaggactggaaaaggacacagcaacacagagaagtgaccagacttgcctagaaccatcatgttcatgttcttctgaaaatcaggaatgccagactgctgccagcactggggaaattctggaaattttgaagaaagggaaggcatttgttttagatattgacttggattttttttcagtcaagaatcccttcaaagaaatgttcactcaggtaaataattgtgtttttaacacatagatcttgagaattgtatggcttttctctagatgaggaaccagcaaactctttaaacagccagctagcaattattttaggctttggggttcacattctctactaatacccttttctgttgttttctaaaccttttaaagttgtatataccattcttaacttgagggccatacacaaacaggctataggctgtggattgccaactcctgctctagatagtattcattattttgcatttattaattggggtaatgtatacatgggtgatggataaaaattaagtcatacagtacaggtatatacagtcagccctctgtatccgtgggttctgtattcctggatttaaccagccacagataggaaatattcagaaaaaataaaaaacaactagaaataacaatacaagagtaaaaaataatacaaataaaaaacaatacagtataacaactatttacataggatttacactgtattagataccacaagtaatttagagatgacttaaagtatatgagagggtatgcatatgttatatgcaaatactacactattttatgtcagggacttgagcatccacagattttggtatccacaggaggtcccagaaccaatcccccacggataccaagggacaagtgtacattgaaaaacagcactctcttatccccattccctcagttctttgcttcagaaacaaatactgtgatcagtttcttgtgtatctttccagcgatattctatatataaatcctgtgtaacagattattccttaaacagtgatgtgcctgattactcacctaaatatttgtaataaatatttgtaatgaaagtttctagaaggttacataaggaattcagtggcagttattccttttagagtgctattaggaaacctgggaacacaaggatttgtatagcctaaataccctttggtacaatggactttttaaaaagcatatattaaactttattatttagtagcaattttttaaatatcattaggaaagacagatgttcatctttttttttttcttaagagcatgttcaggctgggcatggtggctcatgcgtataatcccagcactttgggaggccaaagcaggaggaccacttgagccaaggagtttgagaacagcgtaggcaacgtagcaagaccccatctctattaaaaaaaaattttttttttaatttagccaggcatagtggcacgtgcctgtggtccagctactcaggaggctgagatgggaggatcacttgagcctgggaggtcaaggctgcagtgagtcgtgatcgcacccctgcactccagcctgggtgacagcgagaccccatctcataaaaaagaagcatgttcaaaagttaggggagttaagttctgttgttaactctactgcttattagctatatgatcttaggaaaattacttaacctttccgacccatagtttcttcaagtatcaaatcagaataataatcatacccaactcaggattgttataatgaataaagcactgaagatatgccacaacattgtgcttaatgaattttagcccttgggtataaccttttcctgagaatactcctaaataggattactggggccaggtgtacccacctatataatggatccatgtagctgtgctaaacaaggggaaacattatcctacaaagtttgtatagcaagcctctttctccccttgtgtggtgcctcctgaccgaggttctatgtctttgacattctacctccagtattgcctttgtacttcagagatctcttctgttgttagagaaatggctgcaaagtgaacatagggagttctttgttgttgttattaaagatatgtatatttcctgtaaacagctaagtctgtttagatcctaggacatggcatttatatagcagaatattatttaaaatattttcatctcgtgacccattagccaccaagtatgcttccttaggtaatttttacatagtagtaccatgcccagctggatagagttgccttgaagaagtgatatttacaataaaacaaaattttacaatatttacaataaaattattacaataaaaatctaaagtatacattttgcctgattctcccatacatacctttaaataattatctaagatgttcttgtatcacaaggaaggttgtctcttccttaaagcatatcattaaaaaattttaacttttttttttctggtatgtggattttttgttttgttttccaggaagagtacaaaatcttacaagagctgtaccaatttaagaaacctggcaccaacctaacagaggtatcctccatttgtttctttggggttttattcatttatcatataactaataatatcttgcaaattaccacagtgatctcaaagactgctcaaagtgtgtgtgtgtgtgtgtgtgtgtgtgtgtgtgtgtgtgtgtgtattggcgaagcccatggttagtacttgaaaattatgttttaactaatagagccaagttttttttgtaatgggatgttgcttgttttttgaaagaataactatataatctcagcttttcaatgtatttaaaggaagatttggtagatattgttgatactcgaattcatcaattagaggatttagaagccactttcgctgatttgtgtgatggtgatgatgaagaaacggtacagagatgggcttcaaaccctgggtaagactctcaaacatttttttcccccaactctactaactttcagtcctagatatgttcctaaatttgcaagatacattgcttttaaaaaagtagtattcagctacttgggacactgaggcaggagaggaccacttgaggccaggagttccagaccagcctgggtaatgtaacaagaccctgtctctaaaaaaaggttttttaattagccagatatggtggcacctacctgtagccactacagccactgctcccagctacttgggaggctgaagtgggaggattgcttgggccaaggagtttgaggctgtagtgggctgtgatcatgccactgcactctaccctgggtgacagagacttgtctcaaaaaagagagaaaaaaaagaattagtattaaatttcaacacatttactaacaatagtagacattattgagtgttttctgtgtaccctttatctaagatttttccttgccttatctcatgtactccttacaacagtcttatggttttattattattatgtcaattttatagatgaggaaaccaaggttaagtaaattgccccaagtcacatagtaagtgggcatgtttttagtctttgtatggtagctgcccctaaatatgagatactatacaaggtcttaaagagaattaaagatgagtagtacataggcattccctgttctaagtagagtaagaaagaaatactaacctaacaacagaaaagtaaattacttgacaagtaaattacaatgcaaaaatttggctgggcgtggtggctcacgcctgtaatcccagcactttgggaggctgaggcgggcggatcatgaggttaggagatcgagaccatcctggccaacacggagaaacccagtctctactaaaaataccaaaaaaaaaaaaaaattagccgggcatagtggtgggcgcctgtagtcccagctactcgggagactgaggcaggaaaatggcgtgaatccgggaggcggagcttgcagtgagccgagattgcatcactgcactccagcctgtggagactggactttttctgagactccgtctcaaaaaaaaaaagcgaaaacttagcttcttttaaggaaaacccaaacacaagtggaagggtattttcaatctcttgacgtgaaggagcagtatttgaaggctagattctccatcaggtaatttatttgactggctgttcatatcaccttgaaagaatggagagagaagttctttttgagtgaaagcctttggtattgaagctggagtgaaagaatattgacataaatattacagtgatttttctctaaaataattcttaaatcatgtaatctcaaacagccagaaaactaaaataaaaccatcagacaaactttttgtccccatgagcataggaaaaccagaactagcttattttaaaactaatctcccacgaactgtcatattattctctctggtgtaaacaaaagaaaatcagttgtaaggtagcaagataaaacgggaaattagaatcaatagtactttaggccagaacatgaacagccactaagatttgtcatgttttggttattaaaaataattcagcagatctctagaagaatatggaaaaagctgaaacagtggttgcctctggggagaggaattctatggctaaatgatgaagtatatgagtgagaaattacttcttttgctatgtgcacgtattatctattcaaaatactcattgtaatttttacttaaaatattcagaaacatccctaaaatgtaaacatcataaagctttaattattgacactaacaaagcagtgatgtggaagaataattcacagtaatattaatcacatcagtaagtattgattaggcactttaacatcagttaatggccgggcgtggtggctcacctctgtaatctgagcactttgggaggccaaggtgggcagatcgcctgagctcaggagttcgagaccagcctgggtgacatggtgaaatcctgtctctacaaaaaaatacaaaaaattagccaggcatggtggcatgcacctgcggccccagctacttgggaggctgaggtgggaggatcacttgagcctgggaggtcaaggctgcagtgagctgagatcgcaccactgctctccagcctgggtgacagagggagaccctgtctcaaaaaaagaaagaaaaaaaaatcagttaatgctttttcctcttcagtatagggttctaaaatgattccctgttttttgaaatgatagaagagggagatagaaaaataagtcacaggacaggagtcttcctagaaatactgaaaaatacctattattttgttatttcatgaagtctcaagctaagtttaaaacttcaacaacaacaaaataggcctggaaaccttggaatcctaagtccagcccacagacttccactgaaacccactctgcctactgagcatgcccagttagctcctcatcaccagcagagagttctatcacagacttgaaaatatgatgagactgcaacagtagtgagtttagactgtgcttggtattgaagggagaaaaaaaatagcataaaggaaaagtagatgacactgaaagaaaagtctccccaaaccaaccatgaccctaaagagccagaccctcggcatggaggcttcgctatgtctagggaagtgaggtgggtgtttagggtccagaagcctagaaaatgtcattaattaaaaggaaaaagtaacaggacaagtgggcaagcaggcaggcctccatgcctccttttttctttctttttttactcccagcaaattcgtgaatatttgtggaggaggaattaaaacactagaagcattagccaatcagagcttccaaaaggtccacctaaacttaataccttaaaagcatcaatgtggccgggcgcgatggctcacgcctgtaatcccagcactttgggaggccaaggcgggcggatcatgaggtcaggagatcgaaaccatcctggctaacacggtgaaaccccgtctctactaaaaaataaaaaaaattagccgggcgtggtggcgggcacctgtagtcccagctacttgggaggctgaggcaggagaatggcgtgaacctggaaggcggagcttgcagtgagccgagatcgtgccactgcactccagcctgggcaacagagtgagactcttgtctcaaaaaaaaaaaaaatgcatcaatgttatatcagatgatgtaggatttttccgattataattgtatttactggctaggcctgggttcacacctgtaaaatcccaacacttgggaggctaaggtggaaggcttacttgaggccaagagttaagaccagtctgggcaacatagcaagaccctatctctacaaaaagattttaaaattagttgggtgtggtggtgttcacttatagtcccagctactcgggaggctgaagtgggagattccttaagcccaggagttcgaggctgcagtgagccatgatcacaccactgccctgtagcctgggtggtagtgagatcctgtctcaatagtaataataattgtatatacaaataaacgtgtccttaattttttttttttttttttagctttcaggaaacagccttttttcatcacagtgtgctaaaaacacttagttttcttgctaatcaaaataattttttttttttttgagacagtttcactcttgtcaccctggctggagtgcaatggtgcggcctcagctcactgcaaactccgcctcctgggttcaagcaattctcctgcctcagcctcccgaatagctgggattacaggcatgcaccaccacacctggctaattttgtatttttagtcgagacagggtttcaccacattggccaggctggtctcgaactcctgacttcaagtgatccgcccgcctcggcctcccaaagtgctgggattataggcatgagccaccgcacctggcctcaaaataatttttaaagtcagtagaacttcccatttttgaagaagaaatctcattttcttgaatgctcacttttagtctttaacacaatgtgtaatcttttgggtaagaaaacaggaaacatttatttcttaatattttaagatatttgaacagctttatcttttatttcccaagtgccatatgaagcatgttattatggtaaatgttagtataatgtataatttgctattatcattttagttgtggtggttgtgatgtttaattgagtgggatggcttttttccagaatggaatcactagttccccttgtacagagtttgaaaaaacggatggaagtaccagactatgaaatggtaaatattttatattaatgtgtaaaattgaccctttgtaaagacaattttctgggtagaagaatttcctttttgttaaagtggttcgtttttgtttgtgttcctgtgaagtctgaaacaattattaagaaaagaaatgagtgaaaaaaatacatacgttgaaacagaatactgttttcctggaaaagtcttccaggaaaaacttttttttctcaattttatgtatgaagcaaaagtcctgtgtgttttttgtaattttgtctgtggtcggatctctcttcaccagacaaaagaaaagtacacaatttctaaaatggtccattttttattgatgagtatttatactgccttctgccttccttcttttcctccctatttaaaaacttttccgtttgtaaaaaccacaagacaaagaaaaaagagagagctgtgactagcacattttaaatgtgttagctgtttgtcaacaggtatctgaatgctatggccaaagatacttttagtcataatttatttgtatatcattttgcagtctttgaagcatatattttcccatttgacctggtacttgagatgagaaagctatagcttaaaatgttcaagtgacttttctcagatttgatgccagggctaagacttccaagtctccttcctcttagtgtggtctttctcttacttcagtaagctgggtttgcatattttatttacttatggaatacagtcagaccactgtgtttgactaaagttgaagtattgatttaagtattgattgaatttataagaatttgctggtactctttaaaataagagatgtctattttcacactgctgataaagacatacctgagactgggcaatttacaaaagagatttaatggacttacagttccatatgattggggagacctcatagtcatggcggaaggtgaaaggcaggtctcacatggtggcagacaagagagagagcttgtgcagggagacttttgtttttaaaactgtgagatctcgtgagactcattcactatcatgagaacagcacaggaaagacccacccctacaattcaatcacctcccatcggcttcctcccactacatgtgggaattgtgggggttacaattcaagatgagatttggatggggacacagccacaccatatcattccatccttagcccctcccaaatctcctgttctcgaatttcaaaaccaatcctgccttcccaacagtccctcaaagtcttaacttatttcagcattaactcaaaagtccacagtccaacatctcatctgagacaaggcaagtcccttccacctatgagcctgtaaaatcaaaagcaagttagttacttcctagatacaatggatgtacaagaattgggtaaatacaaccgttctaaatgggaggaattggcccaaaggggcagtgcaagtctgaagtccatcagggcagtcaaatcttaaagctccaaaacgatcgtctttgactccatgtctcacatccaggtcacgctgatgcaagaggtgggttcgcattgtcttgggcagttctgcccctgtggctttgcgggatacaacctccctcctggctgttttcatgagctggtgttgagtgtctgcagcttttccaggcacacagtacaagctgtcagtggatctaccattctgggatctggaggacggacagtggccctcttctcacagctccactaggcagtgcccctagggactctcagtggggatccgaccccacatttcccttccacactgccctagcaggggttctccatgaggggcctgcccctgcagcaaacttctgcctgggcatccaggtgtttccatacatcttctgaaatctgggcagaggttcccaaacctcaattcttgacttctgtgcactcacaggcttgatcaacaccacaaggaagctgccaaggccatcctctgaaaccacagcccgagctctatgttggccccttttagccatggctggaatggctgagacacaggacaccaagtccctaggctgtacacagcactgggaccctgggccctgcccatggaacaattttttcctcctaaatcttcaggcctgtgatgggaggggctaccgcaaaggtctctgacatgccccagatacattttccctattgtcttggggattaacatttggctcctcgttacttatgcaaatttctgcagccagcttgaatttctcctcaaaaaatggaattttcttttctttaacattgtcaggctgcaaattttccaaacttttatgccctgtttctctcttaaaactgaatgccttggccaggcacagtggttcacgcctataatcccagcactttgggaggccaaggctggcggatcatttgaggccaggagttcaagaccaacctggccaacatgttgaaaccccgtctctactaaaaatacaaaacttagctgggtgtggcagtgcacacctgtaatcctagctactcaggaggttaaggcagagaatcgcttgaacctgagaggcaaaggctgcagtgagccgagatggtaccactgcactccagcttgggtgacagagcgagactccatttcaaaaaaaaaaaaaactggatgcctttaacagcacccatgtcacctcttgaatgctttgctgcttggcagtttcttccaccagatatgctaaatcatctctcaacttcaaagttccacacatctctagggcaggggcaaaatgccaccagtctctttgctaaaatataacaagagtcacctttgttccagttcccagcaagttcttcatctccatctgagaccacctcagcctggatttcattgtccatgtcattatcagcattttggtccaagccattcaacaagtctctaggaagttccaaactgtccaacatttccctgccttcttctgagccctccaaactgttccaacctctgccagttccaaagttgcttccacattttcaggtatcttttcaacagtgctccactctactggtaccaatttactgtattagtctgttttcacgctgctgataaagacatacccaagactgggcaatttacaaaagaaagagatttaatggacttagtgttccacatgattggagaggcctcacaatcatggcagaaggtgaaaggcacatctcacatggcagcagacaagaagagagagcttgtgcagcgagacttgtgtttttaaaaccatcagatctccagccgggcatagtggctcacatctgtaatcccagcattttgggaggccgaagcgagcagatcacctgagatcgggagttcgagaccagcctgaccagcatggagaaaccccatctctatgaaaaacacaaaattagccgggcgtggtggcgcatccctgtaatcccagctactcgggaggctgaggcaagagaatcgcttgaacccaggaggtggagtttgcagtgagccaagatcatgccattgtactccagcctgggcaaaaagagtgaaactctgtctcaaaaaaagtaaataaataaaactgtcagatctcctgatactcattcgctatcatgagaacagtgcaggaaagacccacccccacagtcacctcccaccaggtttctcccatgacacatggaaattgtgggagttacaattcaaggtgagatttgggtggagatacagccaaaccatataatgagcaaagcaaaagaatattttggtgaaacctaagcaaatccaagacttaaacttttttgtttaacttttttttttttcccctgggagcatatattcaaattgccctgaataaacacttccaagacttacactttttaaaaatggtaattaagaagatcgttataagatacttaaggtttgaaaatgttttgaggccaggagcagtggctcatacctgtaatcccagcactttgggaggccaaggcaggtaaatcgcttgagcccaggaatttgagaccagcctgggcaacatggcaaaaccccatctctacaaaaaatacaaaaattagccaggtgtggtggtgcacacctgtagtcccagctacttgagaggctgaggcaggaggattgcttgagcctgggtggttacaatgagttgagatcctgccattggactccagcctgggcaacagagtgagactttgtgtcaaatttaaaaagagaaagaaaatgctttgaattcatacaatattatcaaatatgtctgcaggcaggtctgctttaatcattacattgcatctgggtttttttcgttgggtgggtttgatgttttttggggggcagggaatggctagggctcagtcacagattatgtaatccattatgatatgccctacagctgcagagatagaacgctaaatagttttatcattttggcaaaatgaacatccagaattcatccttttatcacactgactgatcattgccagttaaattgttgatgtgtatccaaagcctccaataaaatatttgattagtgtgttttttcatactttgcacttgcgtactctaggcaaaactatgacatagttaagttccagttttcaaaacattaaagttaaggttgcagaatggtagcatgtgagccacttctaactttcaggcaagtttagtgtagtgctaagactagaacatattccattcaaatttaaaacacataggtagatagcagtagcttatggttatacataaaggatacacaagaaaacagtttggttaaataaggtaggataaatattttctcttgtatcctctcaaagctttgaatgtagtactaggtgcacatattaatatttaaaaagtaagtaaaataatgtgttaaaaatgagataagaatatgtacaatttttttttttctttttgagacggagtttcgctcttgttgcccaggctggagtgcaatggcacgatcttggctcactgtaacctctgcctcccgtgttcaagtgattctcctgccttagcaggagaagctgggattataggcatgtgccaccacgcccggctaattttgtatttttagtagagacggggtttctccatgttggtcaggctggtctccaactcccgacctcaggtgatccgcctgtctcagcctcccaaagtgctgggattacaggcatgagctaccacgcctggcctcaactttttagaatctagatgaaatggataatttgatagaaaatgtgaattaccaaaattgacccaagcccaatgaagtagttaaagaattattctaaaaagaggcatctggcccagacaggcatataggcgagttctaccaacacttcagagagcagataacttttatgacatagaaactgttaaggaaaaaataatcccaatgcataaaaatattaaaaattaaaagtttttcatatttaaggtgttggatatcccagttaccctgatttgatctttatatgctattatgaatcacatgtaccctgaaaatatgcacatcttttatgtatcaataaaagtaaagatttgtcaataaggccattaatgattaaagaagcttataaaaacaactgtcatacagtgtaatttttaattgtcttattttcaggttcaccaggctggtttaacctgcgattattcagaacttcctcaccatatcagcacagaacaagaaatagagtgtcttattcaatctgtgcattatttgctgaaaaatttaccaaatcctactcttgtgacaattgcaaggtaagtgtgttcagcagaataatggcaaatcagagatgtgcacatcctaatctctggaacctgtgaatatgttacattatatggcaaaaggaaattcgcagtgtgattaactcaaggattttgagatgagattatcctggatttatcaggtgggcccagtgtaatcacaagggtcattagaagagaaaggcaggagggtcagaatcagagagagtgattcgaaaattctacacttcgggctttgaaggtggaggccacaagctaaggaacacaggcagccttagaagctagaaaaggccaggggacagattatccttgggatcttacaaaaagaatgcagccctgtcagcacctttattttaggacttctgacctccaaaactatataataaattagtgttgctttaagctactaagtttgtggtgattttttatagcagcagtaggaaactaatacaatctctgtaggtaaataacctggtcactagagcgtaaaatgagtttatcagtggtcttacagattatctctttaggtttgaaatacttgtactaaggagtaggccagataactaattccagttcttctataaagatttctgtgctgctcttctcactctgtcctctagaaggctttattcacccttatccggaaccaggagacactggttaatccagttgtaactggcagcagcattgtaactgcccagtgcaactcaggttgcagttggtaagttctggaaagactcccaaaatacagatatctgccccaacctactttgctcttttctgcttcctactgcctaggaaagtaaatccaacaccagcacatcgccacatttcattttggaccaagccatggatcctttataattttgtagttaacaaatcatttttagaaataggatccttttatcagttggaaaacctcgaccctcatcatttctagccctagcacacacataataaaagatgttccatcgctaagataataagcccctgtattcccaagcaacatctcactttcaggcaaacaatggtctagcaatcaagcattaaggcacacaccgcatgtcaccttgcacaggttaatctctttcagatttctttaaagggatagtaattgtgcctatttcatagagttgctgtgaaaattaaagaacataatttatgtaaggtgactaacatggggtaaaccttcactagctttcaattgatattaatccaaagttcagcacaccttaatttctgttttacattgaaatgaacacatgcagcttttcctcacagtatgattttatcctatgtgtatttttcttctttctctttctgttggttctaggtcaagtctggatgattactgtccttctgaccaagttgacactattcaagaaaaggtcctcaatatgctacgtgccctctatggaaatctagacctccaagtgtatgcagcagagtctcctccatcttgaaacaaacaaaacattaggctcctgttgtatcttggtttagtaacaggcccttaattaacttatttgtacatgagtcttccagagaacactgttttatattaactttcagttgaaatctttcagatattttgaatctctgaacaaccattgtcagttgtgaatgatggtaaattttttggcatcaagtctcataaccccaactgatagaactgttgcttatctgtcttccttaagtattttttagggttttgtttttttttttgtttgtttgtttgtttgtcttcacttttcccccaggtctgttgagctgtatgagattcattcatacttcatttattcattcaactaatatttgttgaacacttacatgtaccagacattattaagtgctgggtatatggtaatgaacagaatagacaaggcccctgcccttttaggggagacagatgagaagtaaattacgggttatgagaaatgttatgaaggaaaggacaacaacagacatgtcttagtacttagggtatcatggctttataggaaagtaacattctctatctttttttttttttttaattttataaaaatagagatggggtctcaccatgttacccaggctggtctcaaactcctgggcacaagcaatccacctgccttcgcctcccgaagtgctgggattacagatgtaagtcactaccccagccagaaactaacattctcaaaagctactaccaaaaaaaccccacaaatttgccaatccatgaaagtatcataggaagtctacctttccaaggaatttggcattgtggccctgctcttgccaaatgctctccagcattgttggtatcaaggtggtctggttgagtaaacttgaccaaacaaaaattaactgttttttgcttttctgtttttgttttgctgatcaaaaaagcccttcagggtctcttgtgcatccaggaggtcattgtagatatcaataatatagtgcctaagtgccactttattgccaagtctagattgatacttttttcagataaaccagctttttatgtaaagagtaagggaaaaagttaaatctttaattctgacctgccataaatacccaaagatataaactgtcttccaccacccccctcataactaagacatccttcctgagtcactcttaatcatgaaacttgattttctcaattggccagtcttctgatctttagtatctctttagttcagtaatttttacctacctacttgatttattttcctttaaaaggtgaaatgacatttaaagaaaaacaaacacccatcattcctcagtcccaacacagcagttcttttcactcttgcttgtaactttcaggccttacccacatgtgttcctatagagttgcatgtagctaaaattatagtgtgctgcctaactttgtgctaataacgaaggacacacattatcattgcctcacagtggatggcacctgaccccatttttccaaggattctattttccagtgaatttttgtcaccgagttaatttcccaagtctgatagcatgaatgcttatttgtgctgtgaaaagcagagcagcctgactcagctttccattttcataggataatatgtgccaaaaaaggtttattttcttggtaaaatcagaattgtagaattgtgctatttttaatttttaaaatttttggttagagcttatagacattacttttatgattattttgcgtgctaaataagttaaagggtatgttttgaactatagcactaattaatgtgtgtgatcctagtatgttgatagctttgattttgtgagtggtttactagtcatttattatgattcccatgaactctgatatgattcattgtggttttaactcaggttgaataaaagcatccatttcttttataggaaggtttgtttaattctcatgttctgtgatcatctctttgagaataaaattcagtccctaatagttgaaaagaatcaacttagtaaattatgtcttgcacattccaaataggaaggtatttactttatcaagatgtgtttcatttgtgttctgagtaccagtgaggggataccgtggtacagtgttttgaattgtgtactaatatcattaaagcatgggattttagtggctttttaaaaaatgtga

SEQ ID NO: 474 - DNA, 104 bp, Homo sapiens
tttttggatttttagtagagacagggtttcaccatgttggccaggatggtctcgatctcttgacttcgtgatccacccgcctcagcctcccaaagtgctaggat

SEQ ID NO: 475 - DNA, 398 bp, Homo sapiens
gacgcagcaccatgcagctcagtcccaacctgtcgcaggacccggcgcgcctgcctagaggacccgaggcaggagttgggggcggggaggtgaagctgcgccatccaggggctgccgagtggagggtcggaagtctccctctagggtctggatcaacaaagcacccgacttaatgcgctgggagagtgattcatgaaaagaaatttaaagctagccctgtgtgcattatcagcccaaccctgcttttctttagtcctagttctttactaaaatctcctgcagggctgagatttactatagtccagtggttcctgtttagtccacagaaaggtggggccgggtggaagaatgcagggcccgcgagcagaagccttctctcccatttaagggtgtgtgca

SEQ ID NO: 476 - DNA, 313 bp, Homo sapiens
tcatgaagcagaggttcctggagcactttccccttcctgtgcttctggttttgaaagccattcaccacctgcctgaattcttcactggtcttcaaggaaaaggaaataaaatgttgaaaagcaagagattactttaataaagaaccgaggagaggaagcacagagctcggcagtccacagcacactcaccatttctccaaaggcgttcatggccattgtgaagctgtgtttcccttccctgtattcctgattgtgctgctcaatcatcttcatgttctgccacactgctctcctccatccttcttcattctag

SEQ ID NO: 477 - DNA, 327 bp, Homo sapiens
atagaataccaacttaaacttcttaattagaatcaggaatcaggactctttggctgctgattggaggaagaactgtccttaaatccagagtgggccgggcatggtggctcatgcctgtaatcctagcactttgggaggccaaggcaggtggatcacctgaggtcaggagttcaagaccagcatgaccaacatggtgaaaccccatctctaccgaaaatacaaaaattagccgggcgtggtggtgtgtgcctgtagtcccagatacttgggaggctgagacaggagaattgcttgaacctgggaggtggaggttgtgtgagtcaagat

SEQ ID NO: 478 - DNA, 327 bp, Homo sapiens
atagaataccaagttaaacttcttaattagaatcaggaatcaggactccttggctgctgattgaaggaagaagtgtccttaaatccagagtgggccgggcatggtggctcatgcctgtaatcctagcactttgggaggccaaggcaggtggatcccctgaggtcaggagttcaagagcagcatgaccaacatggtgaaaccccatctctactgaaaatacaaaaattagccgggcgtggtggtgtgtgcctatagtcccagatacttgggaggctgagataggagaattgcttgaacctgggaggtggaggttgtgtgagccaagat

SEQ ID NO: 479 - DNA, 369 bp, Homo sapiens
agaataccaagttaaacttcttaattagaatcaggaatcaggactctttggctgctgattgaaggaagaactgtccttaaatccagagtgggccgggcatggtggctcatgcctgtaatcctagcactttgggaggccaaggcaggtggatcacctgaggtcaggagttcaagaccagcatgaccaacatggtgaaaccccatctctactgaaaatacaaaaattagccgggcgtggtggtgtgtgcctgtagtcccagttacttgggaggctgagacaggagaattgcttgaacctgggaggtggaggttgtgtgagccaagatcgtgccactgcactctagcctgggtgacagggtgagactccatc

SEQ ID NO: 480 - DNA, 2248 bp, Homo sapiens
agaataccaacttaaacttcttaattagaatcaggaatcaggactctttggctgctgattggaggaagaactgtccttaaatccagagtgggccgggcatggtggctcatgcctgtaatcctagcactttgggaggccaaggcaggtggatcacctgaggtcaggagttcaagaccagcatgaccaacatggtgaaaccccatctctaccgaaaatacaaaaattagccgggcgtggtggtgtgtgcctgtagtcccagatacttgggaggctgagacaggagaattgcttgaacctgggaggtggaggttgtgtgagtcaagatcgcaccactgcactctagcctgggtgacagggcgagactccatctcaaaaaaaaaaaaatccagagtggttggtagtcaagacaaaaagctagattatttttgttagtctgagaactaagcaccttagtggcccaaagacaaggcctgaaatttccatgaaaagaaactgggatctgttcatctgttctgttgagacctcatagttccataccatagaaataggcacagtgggttttggggggagagttgtaagtataagctctctgtacctctgtttactgtttagtgagaatttgggtgtccactgaggcagttcatacttggcggatgattgagtcctgatttctcagggccagcagactctggtgttactgatcttgtggaaaagtcaacccaatgagaagattttatgcagaagttttaaatgcacattgatcataatttgaatatgtcacagtctttatttttcttttcagccaatcctgaggcaaaagaaacattttaattcactgcacattccaaaagccttgcagaaggccctgccatttaagaacaagcccaaggccaggcgcggtggctcacgcctgtaatcccagcactttgggaggctgaggcgggcggatcacgaggtcaggagatcgagaccatcctggctaacatggtgaaaccctgtctctactaaaagtacaaaaaattagccaggtgttgtggtgggcgcctgtagtcccagctacttgggaggccgaggcaggaaaatggcgtgaacctgggaggcagagcttgcagtgaactgagatcgggccactgcactccagcctgtgcgacagtgcgaaactctgtctcaaaaaaaaagaaaaaagaaaaaataaaaaacaaacccaagacccaagcaaaggacaggcggagactggccgtcatgcgtgagcctcatgaaagaaaggtactgtcgcccatgccgtactgcacgctgcatttagataggaaaagaacactctcagtagcacacttcctgtttctactgcagtctcagttattcagggcactggaactaaagtcagaggaagagctggagtcaatttcccttcctttgcctggtcctgctctgccctgttcttttgatggggtataacaggcacatgactggggaacccttctgtcttggttagctgcacacagtgtccacagaatgatgaacagaggtagtaaaggtaaaatgcgatcacacttgtgtctccatgccaacaatgacttcctagcgcaggatgcattttcatgcggttaatattcatttggatcgtgggttgcctctagtcttagtgcttaggatgtgagtgtgtggtggctgagagcattctgatactcaccggcttttgtccttgtcagatcctcacactgctggatgctctgagtatggtgcacagtcagaagatgaagaaggccaaggagcagcggcacctgcacaataaagagcacttcagagccaagcagaaggaggaggaggagaagctgaagtggcagaaggacctcaggaagaagctcttccaaattcaggggcagaaggaaagaagaaaccagaagtccagtttgaagggggctgagggccagtttcagtgagcctttggactggagggactgtccctggatctgcagaggtggacagtttcaaacatcacagtttgaatgcctgtgaatgacaagtcagtgggcaagaactcaagagatgtctctacacaaactgtgcctgcaagaggaacagagaagcctggactacttggaccgggttcattctcatcacttggggctgtcgagatttaaagtgatgtaagctgtggttgtgtggattctcttactttcctctgcctgcctcagtttaattattttgtcctgcaaaaataccattaaatttttttttgttagttttg

SEQ ID NO: 481 - DNA, 369 bp, Homo sapiens
agaataccaagttaaacttcttaattagaatcaggaatcaggactctttggctgctgattgaaggaagaaccgtccttaaatccagagtgggctgggcatggtggctcatgcctgtaatcctagcactttgggaggccaaggcaggtggatcacctgaggtcaggagttcaagaccagcatgaccaacatggtgaaaccccatctctactgaaaatacaaaaattagccgggcgtggtggtgtgtgcctgtagtcccagatacttgggaggctgagacaggagaattgcttgaacctgggaggtggaggttgtgtgagccaagatcgcgccactgcactctagcctgggtgacagggtgagactccctc

SEQ ID NO: 482 - DNA, 393 bp, Homo sapiens
aaatagaataccaagttaaacttcttaattagaatcaggaatcaggactctttggctgctgattgaaggaagaactgtccttaaatccagagtgggccgggcatggtggctcatgcctgtaatcctagcactttgggaggccaaggcagatggatcacctgaggtcaggagttcaagagcagcatgaccaacatggtgaaaccccatctctactgaaaatacaaaaattagccgggcgtggtggtgtgtgcctatagtcccagatacttcggaggctgagataagagaattgcttgaacctgggaggtggaggttatgtgagccaagatcacgccactgcactctagcctgggtgacagggcgagactccatctcaaaaaaaaaaaaaaaaaa

SEQ ID NO: 483 - DNA, 2248 bp, Homo sapiens; identical to SEQ ID NO: 480

SEQ ID NO: 484 - DNA, 390 bp, Homo sapiens
aaatagaataccaagttaaacttcttaattagaatcaggaatcaggactccttggctgctgattgaaggaagaactgtccttaaatccagagtgggccgggcatggtggctcatgcctgtaatcctagcactttgggaggccaaggcaggtggatcccctgaggtcaggagttcaagagcagcatgaccaacatggtgaaaccccatctctactgaaaatacaaaaattagccgggcgtggtggtgtgtgcctatagtcccagatacttgggaggctgagataggagaattgcttgaacctgggaggtggaggttgtgtgagccaagatcgcgccactgcactctagcctgggcgacagggcgagactccatctcaaaaaaaaaaaaaaa

SEQ ID NO: 485 - DNA, 1419 bp, Homo sapiens
atacatgtatttttttaaatgttaatgtgctaatttctactgaagcaatgtggatttttctgaaagctttaatgttttaataagctttttattgaaatgttaatgtccatacagaagagtgcccaaatcataagtgtgcatctagatgaactatagcacaccaggctgccacgccctggaccaagcagtagccttgacctgtggcctctcccaggcactgctgccccaacccacaaaatagctactttcccagttcctgatgtagatttgttctacctggttttgacttctataaaatacagcatattctatttagcctggcttctttggttcagtattacagaatacatctgtgttcttgtctatggcagatactgatttattgtcattgttgagttccattatatgactgtgtcaccatttttccattgatgagtaaagtgatttcctatttttggctgttatcccacggccctgaacactaggtctggatatgggacttgcaggtatgcaggggcacacacacttctgctgggggatccctgggtggggtggagactccagggcacctgtgctctgcttcagtgtggagggttctgtgtcgtgttctgggagcacagtggcttggccctccacccaccagcagcagcttaaagagttcctgctgttccacatgcttgccaacaattggcctcttgagtttttttttttttttttaagttttcagtgcctgcctggacttgtgttttcatttagattttggtttcttagaacttttgtttttctcttcacagcttaacaatgcatttgaaaagatttgttttcatgtggagtattcagttttgtaataagagggttgttcaaggcatcactctgccactctgctagaaacagaagtctcccaggcatttctttttatataaagtagttaatgaaattttgaaccatcttacatgaatttttattaaaatacacttctggatgtggtgcccattatccattctactcttttgtaacaagtagatttctctgaattcttgaatttgaaaacaactggggttcctaaacagagaatatggaatattattagggatgatgtctttaataatatatttcaagacaggagaaactttttctatatagttgactttaataaaaagcttagggcaaaactttcaatatattaacagtatttatgaggcagttaagaatttgggtcatctccatttctgctaaaaatacaaaaaattagccaggtgtggtggcgggcatctgtagtccctgctacttgggaggctgaggcaggagaatggtgtgaacccgggaggcggaggttgcagtgagccgagatcatgccactgcactttagcctgggcgacagagcaagactccatatcaaaaaaaaaaaaaaaaaaaaaa

SEQ ID NO: 486 - DNA, 1420 bp, Homo sapiens
caccatatacatgtattttttaaacgttaatgtgctaatttctactgaagcaatgtggatttttctgaaagttttaatgttttaataagctttttattgaaatgttaatgtacatacagaagagtgcccgaatcataagtgtgcatctagatgaactgtagcacaccaggctgccacgccctggaccaagcagtagccttgacctgtggcctctcccaggcactgctgccccaacctacaaaatagctactttcccagttcctgatgtagatttgttctgcctggttttgacttctataaaatacagcacattctatttagcctggcttctttggttcagtattacagaacacatccatgttcttgtctatggcagacattgatttatcgtcattgttgagttccattatatgactgtgtcaccatttttccattgatgagtaaaatgatttcctatttttggctgttatcccacggccctgaacactaggtctggatatgggacttgcaggtatgcaggggcacacacacttctgctggaggatccctgggtggggtggagactccagggcacctgtgctctgcttcagtgtggaggcttctgtgttgtgttcggggagcacagtggcttggcctccgccaccagcagcagcttaaagagttcctgctgttccacatgcttgccaacaattggcctcttcagttcttttttttttttaggttttcagtgcctgcctggacttgtgttttcatttagattttggtttcttagaattttcgttattctcttcacagcttaacaatgcatttgaaaagatttgttttcatgtggagtattcagttttgtaataagagggttgttcaaggcatcagtctgccactctgctagaaacagaattctcccaggcattttttttatataaagtagttaatgaaattttgaaccatcttacatgaatttttattaaaatacacttcaggatgtggtgcccattatccattctactcttttgtaacaagtagatttctctgaattcttgaatttgaaaacaattggggttcctaaacagagaatatggaatattattggggatgatgtctttaataatacatttcaagataggagaaactttttctatatagttgactttaataaaagcctagggcaaaactttcaatatattaacagtatttatgaggcagttaagaatttgggtcatctccgtctccactaaaaatacaaaaaattagccaggtgttgcggcgggcgcctgtagtccctgctacttgggaggctgaggcaggagaatggtgtgaacccaggaggcggaggttgcagtgagccgagatcatgccactgcactttagcctgggcaacagagtgagactccgtatcaaaaaaaaaaaaaaaaaaaagaat

SEQ ID NO: 487 - DNA, 1529 bp, Homo sapiens
ctgtctttgtcaggggatgagtgcaaggggctattgatcagccccttgctggcgtcactccctcttaaacttttcactgggtactcttttgaactattttttcccccaccgtatacatgtatttttttaaatgttaatgtgctaatttctactgaagcaatgtggatttttctgaaagctttaatgttttaataagctttttattgaaatgttaatgtccatacagaagagtgcccaaatcataagtgtgcatctagatgaactatagcacaccaggctgccacgccctggaccaagcagtagccttgacctgtggcctctcccaggcactgctgccccaacccacaaaatagctactttcccagttcctgatgtagatttgttctacctggttttgacttctataaaatacagcatattctatttagcctggcttctttggttcagtattacagaatacatctgtgttcttgtctatggcagatactgatttattgtcattgttgagttccattatatgactgtgtcaccatttttccattgatgagtaaagtgatttcctatttttggctgttatcccacggccctgaacactaggtctggatatgggacttgcaggtatgcaggggcacacacacttctgctgggggatccctgggtggggtggagactccagggcacctgtgctctgcttcagtgtggagggttctgtgtcgtgttctgggagcacagtggcttggcctccaccaccagcagcagcttaaagagttcctgctgttccacatgcttgccaacaattggcctcttgagtttttttttttttttttaagttttcagtgcctgcctggacttgtgttttcatttagattttggtttcttagaacttttgtttttctcttcacagcttaacaatgcatttgaaaagatttgttttcatgtggagtattcagttttgtaataagagggttgttcaaggcatcactctgccactctgctagaaacagaagtctcccaggcatttctttttatataaagtagttaatgaaattttgaaccatcttacatgaatttttattaaaatacacttctggatgtggtgcccattatccattctactcttttgtaacaagtagatttctctgaattcttgaatttgaaaacaactggggttcctaaacagagaatatggaatattattagggatgatgtctttaataatatatttcaagacaggagaaactttttctatatagttgactttaataaaaagcttagggcaaaactttcaatatattaacagtatttatgaggcagttaagaatttgggtcatctccatttctgctaaaaatacaaaaaattagccaggtgtggtggcgggcatctgtagtccctgctacttgggaggctgaggcaggagaatggtgtgaacccgggaggcggaggttgcagtgagccgagatcatgccactgcactttagcctgggcgacagagcaagactccatatcaaaaaaaaaaaaaaaaaaaaaa

SEQ ID NO: 488 - DNA, 4859 bp, Homo sapiens
  misc_feature (1100): n equals a,t,g, or c
  misc_feature (1790): n equals a,t,g, or c
  misc_feature (1824): n equals a,t,g, or c
  misc_feature (1827): n equals a,t,g, or c
  misc_feature (2467): n equals a,t,g, or c
  misc_feature (2476): n equals a,t,g, or c
  misc_feature (2477): n equals a,t,g, or c
  misc_feature (2479): n equals a,t,g, or c
  misc_feature (2480): n equals a,t,g, or c
  misc_feature (3044): n equals a,t,g, or c
  misc_feature (3045): n equals a,t,g, or c
  misc_feature (3087): n equals a,t,g, or c
  misc_feature (3101): n equals a,t,g, or c
  misc_feature (3393): n equals a,t,g, or c
  misc_feature (3600): n equals a,t,g, or c
aaagaacagaaaaaaggccgggcgcggtggctcacacctgtaatcccagcactttgggaggccgaggtgggcggatcacgaggtcaggagatcgagaccatcctggctaacacggtgaaaccccgtctctactaaaaatacaaaaaattagccgggcgtggtagcgggcgcctgtagtcccagctactcgggaggctgaggcaggagaatggcgtgaacccgggaggcggagcttgcagtgagccgagatcgcgccactgcactccagcctgggcgacagagcaagactccgtctcaaaaaaaaaaaaaaaaaaaaaaaaaaaagaacagaaaaaaaaatttcatgcaaacaaacaggaacttttaaaaaagcaggagttgctataataatatcagatagagttcatggcaaaaagaatttctagaacaaaagaggaatattacgtaataacaaaagagcaagagtatatcttgatcctaaatatatgtgcaccaaacaacacagcttcaaaacacatgaagcaaaacctgatagagcttaaaaaagaaatagaaaaatccataatttatcctagaatatcagcataggaaaaaattggttttaaaaaaggaagcaggctgaacatggtggctcccgcctgtaatcccagcactttgggaagccagggtaggcagatcccttaaggtcaggagtacgagccagcctggccaacatggtgaaaccctgtctctactaaaaatacaaaaattagccgggcgtggtggtgcatgcctgtagtcccagctatttgggaggctgaggcacgagaatcacttgaacccaggaggcagaggttgcagtgagccgagatcatgcaactgcactccagtctgggcaacagagtgagactccatctcaaaaaaaaaaaaaaaaaaaaaggaagcaactaatggtggaagtaaagccaccctgacatgataacaaaagcgtcattttggggaaatgacctcatatcagcagtttccccactcatccagaggtgagtatggtgtactctccatgtagtgacaataaatatatttattaaataaataaatcctgtgtccatgatttctccacnactccatgttagatcctgttatcatccattaggtattaaagtgctctcagccaaggagggtaccgagctcgattcgtatcatgtaacgaagctgggtaaggagttagaggtttgtttagcaagcctttaccggctaggtcggttttcagctctaaccgaacagagcaagccgtctttgtaagactagtcatccaggccacttagccgtctcatcatttatgtttgacagtccgcctatgttgtcgatcaggcaggatatctatcccagtcgagcaagttagtgagcatagccagtcgagtaacggctttttgtgtagcatgccaattctgtctaagcagtgaggcatcacattcattcaacggtgggtagagtgtctttaaagctaagcgtgcgatactgataggccagatatgttagccaggccagtcaattttttctgtcagcctttcaacgctagtgtgtttatccagcatgacatctaaagccagcgtagccacttagtttactagtgagcaaggacattgatgtcagtcaatccacccagtcgggcaagccaggttattcacccagccagccattccagctaggcgacccagccagccaagccacgcagccagccaagccagccagccagccagccaagccagccaagccaatcaagcaagccaagggggatcctctagagtggncttccggactgcaactcgtagaaggtatcagttnttntaccttccccggccagcgggtattgctccggtaaataaagcgacatttaaaaaattgctggtaaatcgcagtggcaatggtttggtgataaaaaatgattcagctaattgggtgacgatttcggatgtcaaagctaataatgtcaaagtcaattatgaaactattatgattgcccccttagaaagtcagagtgttaatgtcaaaagtaataatgcaaataactggcatctgaccattatcgatgaccatggcaactatattagtgacaaaatttaattgcaggagctgcctatgttgagaatgaccccacttgcatcagcaatcgtagcgttattgctcggcattgaagcttatgcagctgaagaaacctttgatacccattttatgataggtggaatgaaagaccagcaggttgcaaatattcgtcttgatgataatcaacccttaccggggcagtatgacatcgatatttatgtcaataagcaatggcgcgggaaatatgagattattgttaaagacaacccgcaagaaacatgtttatcaagagaagttatcaagcggttaggcattaatagcgataacttcgccagcgggggatcctctagagtggacttgcagacagcagactctatcaagggcnattcaaatnntnntaactgcttggtaagtaaccatgatcgaactgatcaagaatctgtaacttggtcaaaggtaaccacaaaattgtgcaaaactacaggatacataaatatttttggggtttcattattacagatgacgttgaggagagaaaagttttacatttttacaatcttaggtttaccaatgggccctgggaggtctaatagcagaattctgcccaatagtggaggcaactcactgacccaaccagtgagagcacaggtagtttccactgtgagaaactcaactacagaaccagagtagaattagaaagaaacaaaagtggaggtaacagctgaactagtgagaagcggaagcacagagaggtgaaggagagaagtggaattgtgagtacggcaccgtcaggagtcaggggccaaaggtccctcttctcaagggggcattaccattactgactcaaaggggagcccttactgacatcccagggctctgggaggctggactacaacctgcctagtgtcatacctgtgctggtaccgagctcgattctatcatgtctgcgtttttaattgatnnacttatttattttatgtggagttctgagagttctttattttngacacaagttcttngtcagatatgtgatttgcaaatattttctctcattctgtaactaatctttccatcatcccaattgcgttttttgcagagcaaaaaaaaatttaattttgatgaggtccaatttatcaattttttcttttataaattgtattttgatgtcaagtctaagggttctgcttagtccctgatcctgaagatttttttttttttttcctgaaaatattacagtttgacatttaagcccatgatccttgtgttatgttttgtataaaatgtgaaggtcaggccaagcctcatctcctngcctagggaggtctgattgttcctgcagcacttgttgaaagggctatcagtcctctactaaactgctgtggcatctttctcaaaaattaattaagcatatttctggggtgggatctctatcttgcaccagtaattaatgtgtctctccctccaccagcaccatactgagttgattactgtagttgtagagtaagctttaataattgnggtaccgagctcgattctaatcatgtctaggtttgaggctgcagtgagccgagatcatgctactgcacaccagtctgagcatcagagtaagactctgtctcaaaaacataacagagcaaaacaaaaaacaacttaaatagcaaaataagattaaccaagataaatcagatgttagaactttaaagcagccatcataaaagtgcttcagaaaacaatggtgaattttcttgaaacaagaacaaaatgaaaatcatacaactgaaaaatacaataactaaatgaaaaaatgtgcagttgggtacaatagcagagtggagacgacagagaacagagtctcttgattcaaggacaattaatagagctggcccataggaacgatggagagataggagactgagaaatgaacgcctcctcggggatgggtgggacagtgaccaaaggcccagcgttcctgtcaccagagtcccaggaggagaggaaggaatgtgtggtgaaaaagtattcaaaggcacagtggttgaagatgtcccaaatttggtaccgagctcgattcgaatcatgtatattctattcttcctagtcaatctagtgcagtcaattcttcctagcatgcctatccatccatgtcttccttccattcatcctatccatccaatccactcatcctcttaagtcatccagccatccatccaagccacccatccaatccttccatgccagcccagccacccaagccacccagccacactccatctgaaaaaaagaagcactccatccagcctgggcagtagagcgagagtccatctccaagaaaaaaaaaaaacaaaactaaacaccagcctggccaatatagtggaaccccgtctctaataaatataccaaaaaatcagctgggcgtggtggcacacgcctgtaatcccagctacttgggaggcccaggcaggaagatctcttgaacccgggaggtggaggtcgcagcgaaccaagattgcaccactgcactccagcctgggcaacagggcgagacttcctctcagaaaaaaaaaaaaaaaaaaaaagaccagcctggcctacatggtgaaacctcgtctctactaaatatacaaagaaattagctgggcgtggtggcacacacctgtaatcccagctactcaggaggcccaggcaggaggatcgcttgaacccgggaagtggaggctgcagcaagccaagattgcacaactgtactccagcctcggcaacagagtgagactccatct

SEQ ID NO: 489 - DNA, 612 bp, Homo sapiens
gggaactaaaaaaaatagttgtaactttgaagcctttttatggatcaacatgaagattgagggatctcaaacagaaagggcatcctggtggcaaaggttaatcattaccagactgcaagagtagtttcaatggcaagaaagcagcaacagaatcaatgaaaacaaagcaatgattagaatgccctttccccttctcctcctgacttgtagacactgattgtcttccttggacttagggaaccccttaggttcttgaaaaattcaatgatcaggctatagtagatggtccccagtacacagcacaagattttttgataaactggacattttgaaacccaaataactaattagaaaaatcaaacatgtgaaactactttatcccatgcataggggttatactggaaataaaatgtacaacattggaatcctgaaggagaaaagtcctaaaagtttcaatatcaagaatcctgcacctgctgctacttatctagccttttgcttgatttctggctgatgaacttgcacaactcttgaaaacttaaaaacttgaaaatttgtcacttgaaaactacttgaaccaaactatgaaatctcacctgatatataagatgc

SEQ ID NO: 490 - DNA, 1518 bp, Homo sapiens
tgtctttgtcaggggatgagtgcaaggggctattgatcagccccttgctggcgtcactccctcttaaacttttcactgggtactcttttgaactattttttcccccaccgtatacatgtattttttaaacgttaatgtgctaatttctactgaagcaatgtggatttttctgaaagttttaatgttttaataagctttttattgaaatgttaatgtacatacagaagagtgcccgaatcataagtgtgcatctagatggactgtagcacaccaggctgccacgccctggaccaagcagtagccttgacctgtggcctctcccaggcactgctgccccaacacacaaaatagctactttcccagttcctgatgtagatttgttctgcctggttttgatttctataaaatacagcacattctatttagcctggcttatttggttcagtattacagaacacatccatgttcttgtctgtggtagacattgatttatcgtcattgttgagttccattatatgactgtgtcaccatttttccattgatgagtaaaatgatttcctatttttggctgttatcccacggccctgaacactaggtctggatatgggacttgcaggtatgcaggggcaaacgtgcttctgctggaggatccctgggtggggtggagactccagggcacctgtgctctgcttcagtgtggaggcttctgtgtcgtgttctgggagcacagtgtcttggcctccaccaccagcagcagcttaaagagttcctgctgttccacatgcttgccaacaattggcctcttcagtttttgtttttgtttttttttaggttttcagtgcctgcctggacttctgttttcatttagattttggtttcttagaactttcgttattctcttcacagcttaacaatgcatttgaatagatttgttttcatgtggagtattcagttttgtaataagagggttgttcaaggcatcagtctgccactctgctggaaatagaagtctcccaggcatttctttttaaagtagttagtgaaattttgaaccatcttacatgaatttttattaaaatacacttcaggatgtggtgcccattatccattctactcttttgtaacaagtagatttctctgcattcttgaatttgaaaacaactggggttcctaaacagagaatatggaatattattggggatgatgtctttaataatacatttcaagataggagaaaccttttctatatagttgactttaataaaagcctagggcaaaactttcaatatattaacagtatttatgaggcagttaagaatttgggtcatctccgtctccactaaaaatacaaaaagttagccaggtgtggtggtgggcgcctgggctacttgggaggctgaggcaggagaatggtgtgaacccgggaggcggaggttgcagtgagccgagatcatgccactgcactttagcctgggcgacagagcgagaccctgtatcaaaaaaaaaaaaaaaaaagaa

SEQ ID NO: 491 - DNA, 434 bp, Homo sapiens
ctctgagcaactctgggtgtacattttcctctattcctcaagagctattgtgaatttgatcatccagtatgctgataggcctggggactgacacatagtaagcccataacaattataatttaaaactaatttgttatatagcataattgatatattttaaaatgcaaaactataattcaactaaaatatacaaggcactctaagtcataccatgttttaagtagcttacaaggtgatcagcaagtgtcttatacaaaaagcaaatttgttcaaagagaagccttgcaaataagtatttataattgtatggttttatattttagccagaagagtgaaattgtttagcaatgggggaaataaaagaatgtttaattacagttgcagataattgccttttccaaagacaatgtatgtaggcagaagtcatacctgtt

SEQ ID NO: 492 - DNA, 1527 bp, Homo sapiens
ctgtctttgtcaggggatgagtgcaaggggctattgatcagcccttagctggcatcactccctcttaaacttttcactggatactcttttgaactgtttttttcccccaccatatacatgtattttttaaacgttaatgtgctaatttctactgaagcaatgtggatttttctgaaagctttaatgttttaataagctttttattgaaatgttaatgtacatacagaagagtgcccgaatcataagtgtgcatctagatgaactgtagcacaccaggctgccacgccctggaccaagcagtagccttgacctgtggcctctcccaggcactgctgccccaacccacaaaatagctactttcccagttcctgatgtagatttgttctgcctggttttgacttctataaaatacagcacattctatttagcctggcttctttggttcagtattacagaacacatccatgttcttgtctatggcagacattgatttatcgtcattgttgagttccattatatgactgtgtcaccatttttccattgatgagtaaaatgatttcctatttttggctgttatcccacggccctgaacagtaggtctgcatatgggacttgcaggtatgcaggggcacacccacttctgctggaggatccctgggtggggtggagactccagggcacctgtgctctgcttcagtgtggaggcttctgtgttgtgttctgggagcacagtggcttggcctccgccaccagcagcagcttgaagagttcctgctgttccacatggttgccaacaattggcctcttcagtttttttttttttttttaggttttcagtgcctgcctggacttgtgttttcatttagattttggtttcttagaactttcgttattctcttcacagcttaacaatgcatttgaaaagatttgttttcatgtggagtattcagttttgtaataggagggttgttcaaggcatcagtctgccactctgctagaaacagaattctcccaggcatttctttttatataaagtagttaatgaaattttgaaccatcttacatgaatttttattaaaatacacttcaggatgtggtgcccattatccattctactcttttgtaacaagtagatttctctgaattcttgaatttgaaaacaattggggttcctaaacagagaatatggaatattattggggatgatgtctttaataatacatctcaagataggagaaactttttctatatagttgactttaataaaagcctagggcaaaactttcaatatattaacagtatttatgaggcagttaagaatttgggtcatctctgtctccactaaaaatacaaaaagttagccaggtgtggtggcgggtgcctgtagtccctgctacttgggaggctgaggcaggagaatggtgtgaacccgggaggtggaggttgcagtgagccgagatcatgccactgcactttagcctgggcaacagagcgagactgcgtatcaaaaaaaaaaaaaaaaaagaa

SEQ ID NO: 493 - DNA, 1529 bp, Homo sapiens; identical to SEQ ID NO: 487

SEQ ID NO: 494 - DNA, 434 bp, Homo sapiens; identical to SEQ ID NO: 491

SEQ ID NO: 495 - DNA, 1524 bp, Homo sapiens
ctgtctttgtcaggggatgagtgcaaggggttattgatcagccccttgctggcatcactccctcttaaacttttcactggatactcttttgaactattttttcccccaccatatacatgtattttttaaacgttaatgtgctaatttctactgaagcaatgtggatttttctgaaagttttaatgttttaataagctttttattgaaatgttaatgtacatacagaagagtgcccgaatcataagtgtgcatctagatgaactgtagcacaccaggctgccacgccctggaccaagcagtagccttgacctgtggcctctcccaggcactgctgccccaacctacaaaatagctactttcccagttcctgatgtagatttgttctgcctggttttgacttctataaaatacagcacattctatttagcctggcttctttggttcagtattacagaacacatccatgttcttgtctatggcagacattgatttatcgtcattgttgagttccattatatgactgtgtcaccatttttccattgatgagtaaaatgatttcctatttttggctgttatcccacggccctgaacactaggtctggatatgggacttgcaggtatgcaggggcacacacacttctgctggaggatccctgggtggggtggagactccagggcacctgtgctctgcttcagtgtggaggcttctgtgttgtgttcggggagcacagtggcttggcctccgccaccagcagcagcttaaagagttcctgctgttccacatgcttgccaacaattggcctcttcagttctttttttttttttaggttttcagtgcctgcctggacttgtgttttcatttagattttggtttcttagaactttcgttattctcttcacagcttaacaatgcatttgaaaagatttgttttcatgtggagtattcagttttgtaataagagggttgttcaaggcatcagtctgccactctgctagaaacagaattctcccaggcattttttttatataaagtagttaatgaaattttgaaccatcttacatgaatttttattaaaatacacttcaggatgtggtgcccattatccattctactcttttgtaacaagtagatttctctgaattcttgaatttgaaaacaattggggttcctaaacagagaatatggaatattattggggatgatgtctttaataatacatttcaagataggagaaactttttctatatagttgactttaataaaagcctagggcaaaactttcaatatattaacagtatttatgaggcagttaagaatttgggtcatctccgtctccactaaaaatacaaaaaattagccaggtgttgcggcgggcgcctgtagtccctgctacttgggaggctgaggcaggagaatggtgtgaacccaggaggcggaggttgcagtgagccgagatcatgccactgcactttagcctgggcaacagagtgagactccgtatcaaaaaaaaaaaaaaaaaagaa

SEQ ID NO: 496 - DNA, 612 bp, Homo sapiens
gggaactaaaaaaaatagttgtaactttgaagcctttttatggatcaacatgaagattgagggatctcaaatagaaagggcatcctggtggcaaaggataatgattaccagactgcaagagtactttcaatggcaagaaagcaacaacagaatcaatgaaaacaaagcaatgattagaatgccctttccccttctcctcctgacctgtagacgctgattgtcttccttggacttagggaaccctttaagttcttgaaaaattcaatgatcaggctatagtagatagtccccagtacacagcacaagattttttgataaactggacattttgagacccaaataactaattagaaaaatcaaacatgtgaaactactttatcctatgcataggggttatactggaaataaaatgtacaacattggaatccctaaggagaaaagtcctaaaagtttcaatatcaagaatcccgcacctgctgctacttatctagccttttgcttgatttctggctgacgaagttgcacaactcttgaaaactaaaaaccttgaaaatttgtcacttgaaaagtacttgaaccaaactatgaaatctgacctgctatataagatgc

SEQ ID NO: 497 - DNA, 352 bp, Homo sapiens
caggaaaaagaatctaagctggtcatcaggtgaccaaggttttggtcaggactcgtctacttgcttggtggttgatttcagggaagtaacctacattatctgttactgtttggtcttctcagtggaaagttctctcatcacattaggctcttaatatgacaaaaagaaacttaggaaagcagtttttaaaaagcaaagtttattcttgttttgtttctgtttggctgcttatcatacagcagaacagactactgaaaactggacattcaaagcctgaatttcaagacctcacacttgacacttccatgaaagcaggcaaaagactcaggtgcaggcaaggaaaggggcttcc

SEQ ID NO: 498 - DNA, 227 bp, Homo sapiens
gagtctctgagcaagttaatctccctatgatgcctcatctaccacatataaagcttggctgaaaatgtaataatctctatggtctttttcagctctaataccacatgtgactctagactgtgccactaagtgaatcttgctgtacctaagtgggtggcttagagctaagaggctcttgactggagagcaggcgtgacctgagccactgatctctgccctccacatta

SEQ ID NO: 499 - DNA, 227 bp, Homo sapiens; identical to SEQ ID NO: 498

SEQ ID NO: 500 - DNA, 250 bp, Homo sapiens
tcacctgaggtcaggagttcaagaccagcctgaccaatatggtgaaaccctgtctcccctaaaaatacaaaaattagctgggcgtggtggcatgtgcctgtaatcccagctactcaggaggctgaggcaggagaattgcttggacctgggaggcggaggttgcagtgagccgagatcacgccactgcactccagcctgggtgacagagtgagagtccatctcaaaaaaaaaaaaaaaaaaatacaacccc

SEQ ID NO: 501 - DNA, 250 bp, Homo sapiens
tcacctgaggtcaggagttcaagaccagcctgaccaatatggtgaaaccctgtctctactaaaaatacaaaaattagctgggcgtggtggcatgtgcctgtaatcccagctactcaggaggctgaggcaggagaattgcttggacctgggaggcggaggttgcagtgagccgagatcacgccactgcactccagcctgggtgacagagtgagactccctctcaaaaaaaaaaaaaaaaaaaaaatacaac

SEQ ID NO: 502 - DNA, 348 bp, Homo sapiens
ccactacataatatttcaacaagggctccagcttgagtctgactatatgtaaccttaagacacattggcttggatgggtgcaaaggacacaaggatttgcaataggaccaagaaacatctagggtcagactcagtttaaggcagctgctcccaagcctggcagcacattaacatcactgaggccatctaggccccactccagagcaattaaatcagaatttctggaggtgaagtgcagacaccggtattttcttttaaagtatcctaggggaccttaatgtgcagctggggttaagaaccactaagctaaggaaacagaactcaaggtggacatcttgggtccaaagg

SEQ ID NO: 503 - DNA, 348 bp, Homo sapiens; identical to SEQ ID NO: 502

SEQ ID NO: 504 - DNA, 471 bp, Homo sapiens
tttatgggcagaagcacacgatagagtttattacaaccaatagaattaacatcaatattttaagtgaacagaattttatgatatgggtataagcaagccaatgtctccaaattgctagcctttaagagccaaacaaaatacctcaagctttcagcctgtgtgtctgtaagttagccaattctctccccaatgcacctaaggattcttgagaatgcttacaaagcctgattgccactaagcctgattgtcactcttctgagctttagactactactccagagaagttgcttgtcccctcttaccattagggaccaatttcccacagaacaggatcctaatcagttcccacaccctgttcctagcattactttgtctaaacacagaagagctttctctttcatacgcaagtcatactgacagacctacttgccgacctaggtagcaaacatctgaaggtattaagagaatcac

SEQ ID NO: 505 - DNA, 471 bp, Homo sapiens
tttatgggcagaagcacatgatagagtttattacaaccaatagaattaacatcaatattttaagtgaacagaattttatgatatgggtataagcaagccaatgtctccaaattgctagcctttaagagccaaacaaaatacctcaagctttcagcctgtgtgtctgtaagttagccaattctctccccaatgcacctaaggattcttgagaatgcttacaaagcctgattgccactaagcctgattgtcactcttctgagctttagactactactccagagaagttgcttgtcccctcttaccattagggaccaatttcccacagaacaggatcctaatcagttcccacaccctgttcctagcattactttgtctaaacacagaagagctttctctttcatacgcaagtcatactgacagacctacttgccgacctaggtagcaaacatctgaaggtattaagagaatcac

SEQ ID NO: 506 - DNA, 318 bp, Homo sapiens
tcaggacatccatcgggtggaaactgctgcactcccccacccgttcaggccactggagtgtcaccaaaccaccagggctgcccctgctggagtagctcacctgggtaactctgaggacaagcccccttggagactcttctcaggagggaggtggcattttccaagaaagggttcaacacagacctctgagtcagaggaccagttaaagagaaaattattctgactttattcaggaatgttgctgtaggggtcgtgattattgccatgcggggagttgcccttgaggcagctgggagtggctcacgcctgtaatcccag

SEQ ID NO: 507 - DNA, 318 bp, Homo sapiens; identical to SEQ ID NO: 506

SEQ ID NO: 508 - DNA, 155 bp, Homo sapiens
gtctctactaaaagtacaaaaattagccaggcatggtggcgcgtgcctgtaatcccagctactcgggaggctgaggcaggagaatcgtttaagcctgggaggtggaggttgcagtgagctgagatcgcaccactgcactccatcctgggcgacag

SEQ ID NO: 509 - DNA, 155 bp, Homo sapiens; identical to SEQ ID NO: 508

SEQ ID NO: 510 - DNA, 1224 bp, Homo sapiens
tctgacactacttttcatccccagaagtacgatttgaggcttttttccccgtctttacttaacatattgtctttcctttcctccagcatcttgaacatatggaacatggtcacagcataagcatgtgtgtgctgtcctctacttgccctgtcacctccagcatcttgaacatatggaacatggtcacagcataagcatgtgtgtgctgtcctctacttgccctgtcacctccagcatcttgaacatatggaacatggtcacagcataagcatgtgtgtgctgtcctctacttgccctgtcacctccagcatcttgaacatatggaacatggtcacagcataagcatgtgtgtgctctcctctacttgccctgtcacctttgtcatttccaggtcagttactacaacctccacctcccggattcaagtgattctcctgcctcagccttctgagtaactggggctacaggttgcctgccaccacgcctggctagtttttttatttttagtagagatggggtttcaccatgttgtccaggctggttgtgaacttctggtctgaagtgattcgccctcctcggcctcccagagtgctgggattacaggcgtgagccactgtgcccggccccaggtcaattttgattgatttttcccatctctccatatgggtcataatgtcctgcctcttttcatgcctgtttttttgttttttgtttttcccggatattcaatattttgtattctaccttgtttggtgctggatatttttgtaaacctatacatatctttgcatttgtttctcgaatgtgatcaagttacttggaaactgtgtggtccttttttttcaggcagggtctcactgtgtcgcacgggctggagtgtagtggtgtgatcttggctctctgcagtctcggccccctgggctcaagtgattctcccacctcagcctccccaatagctggggccacaggcacgcatcaccacattggcgactttttggatttttgtagagatggggtttcaccgtgttgctcaggctagtctcgacctcctgggctcaactggtctgcctgccttggcttcccaaagttctgggattacaggtgtgagcccccacatctggctctgggtcttcttattcagtggtgtttggtgggacctgaactgtatttagtctcgtgttgatgcttccctactacggggtgagaacttcttcctgctctaac

SEQ ID NO: 511 - DNA, 302 bp, Homo sapiens
atctttagtatattgagcctttgaatccatgaacatggtggtacatcttttaggtctatgatttctttcatcagcattttatagttttcaccatataaaatctgtgtgtattttgttaagtgtacacttatttaagtatttcactttctttggagtgattgtaaaatatattgtttgtttaatttcagttttcacatatttattgcaactgaccagaaaatgaaatgggattgtcttttgtgtgttgacattatttccccaagaccttgctcaacttatttggtatttgcttttgagtgtgt

SEQ ID NO: 512 - DNA, 448 bp, Homo sapiens
ggaaaatcaggttgaccacaacttctgtagttcttgagggaagaagggaagtataatgatgttggaagtcaaaatattgacattaagatagccaagtggagttttattatgtatgtatgcatgtagacatgattgaaatgtatattacaagctcatatgacatacctttataatagagaggtacctgtggattctaccttacttttgttagtgttttcactgtttcatgtgagttttacaatgaacctgtgagatttgcagagttaagagttataataacccgtctatggtagaaaacacaggttcattcagaggagtaaagtggcttgcttgagatctgtgtcagtggtagtcttctgactagtgtttcacagagttgttttgacctaagaaagttagagcctgggccagacgcggtggctcacgcctgtaatcccagcactttggg

SEQ ID NO: 513 - DNA, 326 bp, Homo sapiens
cgattagtcagtggatagtttttaatttgacttaaaaaattgggggtcacataaagggaaccagcaaaagatttggattctgatgaacaaggtttaaggctcagctctgccactgacatgctgtgttacatgggcaagtccccactcaccatctttggtcctttatgtactcttctggttctcattgtttcttccctgaaaaaatcagggtgctgaatggtcaggtgagctccctattctctgttggtgagtggccctcattcctggtcagttagccatgggctattgagggaagatgttttatgaagtgtattgatggtaaattt

SEQ ID NO: 514 - DNA, 640 bp, Homo sapiens
aaattgtaagcgttaatattttgttaaaattcgcgttaaatttttgttaaatcagctcattttttaaccaataggccgaaatcggcaaaatcccttataaatcaaaagaatagaccgagatagggttgagtgttgttccagtttggaacaagagtccactattaaagaacgtggactccaacgtcaaagggcgaaaaaccgtctatcagggcgatggcccactacgtgaaccatcaccctaatcaagttttttggggtcgaggtgccgtaaagcactaaatcggaaccctaaagggagcccccgatttagagcttgacggggaaagccggcgaacgtggcgagaaaggaagggaagaaagcgaaaggagcgggcgctagggcgctggcaagtgtagcggtcacgctgcgcgtaaccaccacacccgccgcgcttaatgcgccgctacagggcgcgtccattcgccattcaggctgcgcaactgttgggaagggcgatcggtgcgggcctcttcgctattacgccagctggcgaaagggggatgtgctgcaaggcgattaagttgggtaacgccagggttttcccagtcacgacgttgtaaaacgacggccagtgaattgtaatacgactcactatagggc

SEQ ID NO: 515 - DNA, 640 bp, Homo sapiens
aaattgtaagcgttaatattttgttaaaattcgcgttaaatttttgttaaatcagctcattttttaaccaataggccgaaatcggcaaaatccsttataaatcaaaagaatagaccgagatagggttgagtgttgttccagtttggaacaagagtccactattaaagaacgtggactccaacgtcaaagggcgaaaaaccgtctatcagggcgatggcccactacgtgaaccatcaccctaatcaagttttttggggtcgaggtgccgtaaagcactaaatcggaaccctaaagggagcccccgatttagagcttgacggggaaagccggcgaacgtggcgagaaagsaagggaagaaagcgaaaggagcgggcgctagggcgctggcaagtgtagcggtcacgctgcgcgtaaccaccacacccgccgcgcttaatgcgccgytacagggcgcgtccattcgccattcaggctgcgcaactgttgggaagggcgatcggtgcgggcctcttcgctattacgccagctggcgaaagggggatgtgctgcaaggcgattaagttgggtaacgccagggttttcccagtcacgacgttgtaaaacgacggccagtgaattgtaatacgactcactatagggc

SEQ ID NO: 516 - DNA, 654 bp, Homo sapiens
aataccgcatcaggaaattgtaagcgttaatattttgttaaaattcgcgttaaatttttgttaaatcagctcattttttaaccaataggccgaaatcggcaaaatcccttataaatcaaaagaatagaccgagatagggttgagtgttgttccagtttggaacaagagtccactattaaagaacgtggactccaacgtcaaagggcgaaaaaccgtctatcagggcgatggcccactacgtgaaccatcaccctaatcaagttttttggggtcgaggtgccgtaaagcactaaatcggaaccctaaagggagcccccgatttagagcttgacggggaaagccggcgaacgtggcgagaaaggaagggaagaaagcgaaaggagcgggcgctagggcgctggcaagtgtagcggtcacgctgcgcgtaaccaccacacccgccgcgcttaatgcgccgctacagggcgcgtccattcgccattcaggctgcgcaactgttgggaagggcgatcggtgcgggcctcttcgctattacgccagctggcgaaagggggatgtgctgcaaggcgattaagttgggtaacgccagggttttcccagtcacgacgttgtaaaacgacggccagtgaattgtaatacgactcactatagggc

SEQ ID NO: 517 - DNA, 640 bp, Homo sapiens; identical to SEQ ID NO: 514

SEQ ID NO: 518 - DNA, 648 bp, Homo sapiens
gcatcaggmaattgtaagcgttaatattttgttaaaattcgcgttaaatttttgttaaatcagctcattttttaaccaataggccgaaatcggcaaaatcccttataaatcaaaagaatagaccgagatagggttgagtgttgttccagtttggaacaagagtccactattaaagaacgtggactccaacgtcaaagggcgaaaaaccgtctatcagggcgatggcccactacgtgaaccatcaccctaatcaagttttttggggtcgaggtgccgtaaagcactaaatcggaaccctaaagggagcccccgatttagagcttgacggggaaagccggcgaacgtggcgagaaaggaagggaagaaagcgaaaggagcgggcgctagggcgctggcaagtgtagcggtcacgctgcgcgtaaccaccacacccgccgcgcttaatgcgccgctacagggcgcgtccattcgccattcaggctgcgcaactgttgggaagggcgatcggtgcgggcctcttcgctattacgccagctggcgaaagggggatgtgctgcaaggcgattaagttgggtaacgccagggttttcccagtcacgacgttgtaaaacgacggccagtgaattgtaatacgactcactatagggc

SEQ ID NO: 519 - DNA, 654 bp, Homo sapiens
aaatacgcatcaggaaattgtaagcgttaatattttgttaaaattcgcgttaaatttttgttaaatcagctcattttttaaccaataggccgaaatcggcaaaatcccttataaatcaaaagaatagaccgagatagggttgagtgttgttccagtttggaacaagagtccactattaaagaacgtggactccaacgtcaaagggcgaaaaaccgtctatcagggcgatggcccactacgtgaaccatcaccctaatcaagttttttggggtcgaggtgccgtaaagcactaaatcggaaccctaaagggagcccccgatttagagcttgacggggaaagccggcgaacgtggcgagaaaggaagggaagaaagcgaaaggagcgggcgctagggcgctggcaagtgtagcggtcacgctgcgcgtaaccaccacacccgccgcgcttaatgcgccgctacagggcgcgtccattcgccattcaggctgcgcaactgttgggaagggcgatcggtgcgggcctcttcgctattacgccagctggcgaaagggggatgtgctgcaaggcgattaagttgggtaacgccagggttttcccagtcacgacgttgtaaaacgacggccagtgaattgtaatacgactcactatagggc

SEQ ID NO: 520 - DNA, 654 bp, Homo sapiens; identical to SEQ ID NO: 516

SEQ ID NO: 521 - DNA, 640 bp, Homo sapiens; identical to SEQ ID NO: 514

SEQ ID NO: 522 - DNA, 640 bp, Homo sapiens; identical to SEQ ID NO: 514

SEQ ID NO: 523 - DNA, 640 bp, Homo sapiens; identical to SEQ ID NO: 514

SEQ ID NO: 524 - DNA, 389 bp, Homo sapiens
tcttacaatcacatctgtgttttctaaaggcctgacactgattggtacatggagtacagcctgaagggaacaagacttgttagaaaggaagctattgactgggtgtggtggctcgtgcctataatcccagcactttgggaggctgaggtgggcagattacttgaggccaggagttcgagatcagcctggccaacacggtgaaaccccgtctctactaaaaatacaaaaattagcaggttgtggtggtgagcacctataatcccagctgcttgggaggctgaggcaggacaattgcttgaacctgggaggctgaggttgcagtgagcccagactgcgccactgcactccagcctgggtgacagagacttcctttccaaaataaaaaaaaa

SEQ ID NO: 525 - DNA, 389 bp, Homo sapiens
tcttacaatcacatctgtgttttctaaaggcctgacactgattggtacatggagtacagcctgaagggaacaagacttgttagaaaggaagctattgactgggtgtggtggctcgtgcctataatcccagcactttgggaggctgaggtgggcagattacttgaggccaggcgttcgagatcatcctggccaacatggtgaaaccctgtctctactaaaaatacaaaaattagcgggttgtggtggtgagcacctataatcccagctgcttgggaggctgaggcaggagaattgcttgaatctgggaggctgaggttgcagtgagcccaggttgcgccactgcactccagcctgggtgacagagacttcctttccaaaataaaaaaaag

SEQ ID NO: 526 - DNA, 389 bp, Homo sapiens; identical to SEQ ID NO: 524

SEQ ID NO: 527 - DNA, 653 bp, Homo sapiens
ggcaggaggaaacacgatggattgggtgggagtagggaaacagatgagaagaggtatcaggaaagctgcctaggtttctggtctgtgccactgtgtggatgatgagagaatgtgtcagtggtggaggccaaggtctgaaagtggagtggggaagagtgagagagaaaattgtaagtttacctttatgttcagctgaggtcatttcgaaacatacaagcagcagtatgaagaattccattgatatatttgtccggagcccagagtgaggtttaaataagaagaaataaactcgctagtaaaaattgcagacacacaaaaggcttgaacaggcacttcacaaaatagattatccaaatgaccaataaatacataagtactcaacatcattagccattagaaaaatgcaagttaaaaccacaatgagataccatttcacactagaatgaataaaattttaaaagactgacaatgctaaatattcccaggatgcagaacaaccaaaaccctcatatattatgggggacatggaaaattgtacaactcctttggaaaacaggtagtttctacagaatttcaatatatacataccatacaactcagccattgcattcctatttacccaacagaaataaaatcatttgtctactgaaaaa

SEQ ID NO: 528 - DNA, 1137 bp, Homo sapiens
ggcaggaggaaacgcgatggattgggtgggagtagggaaacagatgagaagaggtatcaggaaagctgcctaggtttctggtctgtgccactgtgtggatgatgaggtcatctactagaggatgtgtcggtggtggaggccaaggtctgaaagtggaggggggaagagtgagagaggaaattgtaagtttacctttatgttcagctgaggtcctttcaaaacatacaagcagcagtatgaagaattccattgatatatttgtccggagcccagagtgaggtttaaataagaagaaataaactcgctagtaaaaattgcagacacaaaaaggcttgaacaggcacttcacaaaatagattatccaaatgaccaataaacacataagtactcaacatcattagccattagaaaaatgcaagttaaaaccgcaatgagataccatttcacactagaatgactaaaattttaaaagactgacaatgctaaatgttcccaggatgcagaacaaccaaaaccctcatatattatgggggacatggaaaattgtacaactgctttggaaaacaggtagtttctacagaatttcaatatatacataccatacaactaagccattgcattcctatttacccaacagaaataaaatcatttgtctactgaaaaatttgcaaaagaatgttcattgcagctgtagccattataaccctcaaacggaaacaacccaatgtgcatggattgtgaatagatgacaaatggtggtccatctatacaatggaatattgctcttcaacagaaacaaactacaggtccatgtagcaacatgatgagtgaaagaagtcagatgtaaaaaagtacatatgtatgttgcaatttatacgacactctagaataggcaaaactcatccttagtgatgaaatcagatctgaggttgcctggggcagagatgggggtagctgactgcaaggaggtgtggggagggttgtgaattttggggagtgatggagctgctctgtatctcaattgtgatgtggttacacaactgcatgcatttgtcaaaactcacagaactacactctaaaacgtataaattttactgcatgtaaatcttaccttaattaaaaattaaaaaaattgaa

SEQ ID NO: 529 - DNA, 1121 bp, Homo sapiens
ggcaggaggaaacacgatggattgggtgggagtagggaaacagatgagaagaggtatcaggaaagctgcctaggtttctggtctgtgccactgtgtggatgatgagagaatgtgtcagtggtggaggccaaggtctgaaagtggagtggggaagagtgagagagaaaattgtaagtttacctttatgttcagctgaggtcattttgaaacatacaagcagcagtatgaagaattccattgatatatttgtccggagcccagagtgaggtttaaataagaagaaataaactcgctagtaaaaattgcagacacacaaaaggcttgaacaggcacttcacaaaatagattatccaaatgaccaataaatacataagtactcaacatcattagccattagaaaaatgcaagttaaaaccacaatgagataccatttcacactagaatgaataaaatattaaaagactgacaatgctaaatattcccaggatgcagaacaaccaaaaccctcatatattatgggggacatggaaaattgtacaactcctttggaaaacaggtagtttctacagaatttcaatatatacataccatacaactcagccattgcattcctatttacccaacagatataaaatcatttgtctactgaaaaatttgcaaaataatgttcattgcggctgtagccattataaccctcaaacggaaacaacccaatgtgcatggattgtgaatagatgacaaatggtggtccatctatacaatggaatattgctcttcaacagaaacaaactacaggtccatgtaacaacatgatgattgaaagaagtcagatgtaaaaaagtacatatgtatgatgcaatttatacgaaactctaggcaaaactaatccttagtgatgaaatcagatctgaggttgcctggggcagagatgggggtagctgactgcaaggaggtgtggggagggttgtgaattttggggagtgatggagctgctctgtatctcaattgtgatgtggttacacaactgtatgcatttgtcaaaactcacagaactacactctaaaacatataaattttactgcatgtaaatcttaccttaattaaaaattaaaaaaattgaa

SEQ ID NO: 530 - DNA, 559 bp, Homo sapiens
tcacctcctccatctgctctttcttatctacctgtctttcatcctctctgttcctatgttttcttcccattctttctttcccttaccttcatttacttttcttttccctaaaaccctagctcaaatagttcaacagaggttacttgaggagtgaggggagggaatgatgaaaactgcaggtgtattccgtttgttccttcgtcttccttaaatattttcataacggtcgtttcggttcgtgcaaagaaaaaaagaatgaatcaactcttaatgactgcctcctactgctgagctctctggactagtcacttcatttatattttctcattttctttattccttactatatttctctgaagtgtcattcccatttcatagttgaggaagctgggactcaggaggattaataacttgtccagcgttacaaagtgagtttaggagccacaattcagattcagatttattgactccaaaatttttgcaggttttaccatagcatgttgcttcagaaataaacagacctggctgcaaaccccagacccaattactctgtgccttt

SEQ ID NO: 531 - DNA, 559 bp, Homo sapiens; identical to SEQ ID NO: 530

SEQ ID NO: 532 - DNA, 645 bp, Homo sapiens
ggatttaaatgctcaactgtttaaatgaactaaacagcatgatttcatgtatagtcatggagcacacaaacaatattttctggacacacgtgtttcttcttttaactgtaaaagaaaaaatgatttcacaggaattacattatttaaatctatttccttctcatgtgactgaagtttaaagttcttagtgctgcaatcgcatcttctcaggtgtgttctgtttccgtccacctatgcataggtgttggtgttgttcatgtcaagctgcctaatttgtttagtaggtgttcgaatggggcatacaattctctagacatgtggcaagcacacgggagaagccaccatccaggtgattcgcagcagtaaggctgatcagaaatttgatcctggctcaggggggttccggcagtaatcaaactctattcaccttgggtgagatttcgttatacctattcagccctgcttcagtgaaatctcactcaggaaaatagattctgtctccaactggaatctcccaaagccatgactatgtttctgatcagcactacagctcagatgaagcgttcagttacctgccagccagtcagcatttccccagactgcaaccagtgttggaaccaatctgcaggagtgggtggattggta

SEQ ID NO: 533 - DNA, 421 bp, Homo sapiens
taaattagggataataataataaatacaacatggaacagttacagtgttaaatgattgaggcatgtaatttgccttacgaaatgcctaactcatggggtgcccttaagaaatactactctcccccacctcctttacaaaattgcatgtctaatgcagtgagaaatgccaggcgtggaagatattctaggtttgatcatctgtggtttcttggccaaaacaagaagtttgagttctacattttattttgagttattaaacattgccatgcatccacaagagctgtattgtggcctgtagagaaacatagcatagtaatcaagagtgcaggctttgggcccacagctctgacctgaggcaaattccctacctctctggccctcagtttcctaatttgtaaagtgtgtatatgtgtggaggtgg

SEQ ID NO: 534 - DNA, 421 bp, Homo sapiens; identical to SEQ ID NO: 533

SEQ ID NO: 535 - DNA, 645 bp, Homo sapiens
ggatttaaatgcacaactgtttaaatgaactaaacagcatgatttcatgtatagtcatggagcacacaaacaatattttctggacacacgtgtttcttcttttaactgtaaaagaaaaaatgatttcacaggaattacattatttaaatctatttccttctcatgtgactgaagtttaaagttcttagtgctgcaatcgcatcttctcaggtgtgttctgtttccgtccacctatgcataggtgttggtgttgttcatgtcaagctgcctaatttgtttagtaggtgttcgaatggggcatacaattctctagacatgtagcaagcacacgggagaagccaccatccaggtgattcgcagcagtaaggctgatcagaaatttgatcctggctcaggggggttccggcagtaatcaaactctattcaccttgggtgagatttcgttatacctattcagccctgcttcagtgaaatctcactcaggaaaatagattctgtctccaactggaatctcccaaagccatgactatgtttctgatcagcactacagctcagatgaagcgttcagttacctgccagccagtcagcatttccccagactgcaaccagtgttggaaccaatctgcaggagtgggtggattggta

SEQ ID NO: 536 - DNA, 282 bp, Homo sapiens
attaaaggctggaaggcactggatgcctgatgatgaagtggactttcaaactggggcactactgaaacgatgggatggccagagacacaggagatcagttggagcaagctcaataacaaagtggttcaacgaggacttggaattgcatggagctggagctgaagtttagcccaattgtttactagttgagtgaatgtggatgattggatgatcatttctcatctctgagcctcaggttccccatccataaaatgggatacacagtatgatctataaagtggg

SEQ ID NO: 537 - DNA, 418 bp, Homo sapiens
gacaattaaaggctggaaggcactggatgcctgatgatgaagtggactttcaaactggggcactactgaaacgatgggatggccagagacacaggagatcagttggagcaagctcaataacaaagtggttcaacgaggacttggaattgcatggagctggagctgaagtttagcccaattgtttactagttgagtgaatgtggatgattggatgatcatttctcatctctgagcctcaggttccccatccataaaatgggatacacagtatgatctataaagtgggatatagtatgatctacttcactgggttatttgaaggatgaattgagataatttatttcaggtgcctagaacaatgcccagattagtacatttggtggaactgagaaatggcataacaccaaatttaatatat

SEQ ID NO: 538 - DNA, 1162 bp, Homo sapiens
tggaagtatctggatgttccttagtcacttaaaggagaactgaaaaatagcagtgagttccacataatccaacctgtgagattaaggctctttgtggggaaggacaaagatctgtaaatttacagtttccttccaaagccaacgtcgaattttgaaacatatcaaagctcttcttcaagacaaataatctatagtacatctttcttatgggatgcacttatgaaaaatggtggctgtcaacatctagtcactttagctctcaaaatggttcattttaagagaaagttttagaatctcatatttattcctgtggaaggacagcattgtggcttggactttataaggtctttattcaactaaataggtaaagaaacctccatgacaggaatctgaaacattgtccctggtgctcataaattctccactgtattgtctgaaatgacttatctcagtcctgactgtgggctcagatttactgtacagttcatcaacttctcagcatgatggataatgaatgtttcatttacatcgctaattgccaagccatggttcctgcaacctttaacccgtatgctttgtcccattatcaccatatgtcaatataattgcatttaacattccaaatgataaactttcctctatacagagaaatatttttcacaaagaaatcgcataagggctgctggtaaaatataagtctattacaggaaatgacagggattcaactagaaatataggaagattctcgtaactagtaaaatccatcgtcagacaaggacccttgatttcatatgtaggaaaaatactggtattttcttaaggatttgtctttgttgccttttaattgaacaaatgcataaaaagagattcctaaagtagtgcaactaaactttcaggcctatgtaagatccaagaagtacatattttttaaaactggttagcgatagctacatgacccaattatattttctatatttatttgattatcagccagtaaactcataatgaagcagctgcgcactcccccaacaattgagaattgaacaaatttccagagagaagtgaaaaatatcaaaaattaaaatcctaaacttgaagacaagttgagagaccatttagtctggccacctgtatccaagattcatttaaaaccaagcagcgg

SEQ ID NO: 539 - DNA, 615 bp, Homo sapiens
  misc_feature (10): n equals a,t,g, or c
cttatctcanaatgtctaaagcaaattttccacagttatcaatcctattttaatatgtaaaactttctgaaaataaatttcaaagaggggactgtgggaaaccaaaatatgccatccaaagcgtgcctctttggcatattttgagatggctattcagagggtctgcagacacaaagcatggctctgaaaatttatccttttgtaaaataaatttacatgtatatattaataaagcaaacaagggatgcaggcagacggtttctctgaggtccttttatttgaatctaggaaagattaactcacaggaaaagaagactaaagacaggtttgacacttttaaaggtctgacagagaaactattaccacaggttaccatctactctttttgagggctattacctgatagaccttctctgcacaatgaaacaacagcctttgttcacagtgcattcttccccttacccttccataacctgtcaccacagcctccaggagcttcaggcctctttttctttctgtatcatataaaaaccttaggcccttctttgagtcctgtattttgtgtagctccctgtgcacgtgcatgtaataaatttgtatgctttttcctgtgaa

SEQ ID NO: 540 - DNA, 615 bp, Homo sapiens
cttatctcaaaatgtctaaagcaaattttccacagttatcaatcctattttaatatgtaaaactttctgaaaataaatttcaaagaggggactgtgggaaaccaaaatatgccatccaaagcgtgcctctttggcatattttgagatggctattcagagggtctgcagacacaaagcatggctctgaaaatttatccttttgtaaaataaatttacatgtatatattaataaagcaaacaagggatgcaggcagacggtttctctgaggtccttttatttgaatctaggaaagattaactcacaggaaaagaagactaaagacaggtttgacacttttaaaggtctgacagagaaactattaccacaggttaccatctactctttttgagggctattacctgatagaccttctctgcacaatgaaacaacagcctttgttcacagtgcattcttccccttacccttccataacctgtcaccacagcctccaggagcttcaggcctctttttctttctgtatcatataaaaaccttaggcccttctttgagtcctgtattttgtgtagctccctgtgcacgtgcatgtaataaatttgtatgctttttcctgtgaa

SEQ ID NO: 541 - DNA, 957 bp, Homo sapiens
cttcaatgaaatttatagaaaagactctcacaagtaccattgaatatagttttctgatgattttgagatcgtagtatttgactgggtaagaattccgaacttcagtgaaaaaactgaactcaaaaaactactaacccaacatcaagcagaataagaattattacatgggactaaagcaatgaaagattatgattttatgacttttttgtttggcacatggcttattctttcatgtttcattttccacattaattttttttttctttcagctatctacagtttacgggaatatgggaaggtgtacttttgtgtgcagaattgaaatttttttttctccctacctgatccctccagagtttggagactatttgtgagtattcttatttcaataacaatatagttatttgcttacatttaagaagaatctattctctttctaataggacacaattggaaacattggccatattaccaaggctttgcctgacatgtcctattctgagatatgaccagattgctctaaggaattaaagttgactttataaagccaattaaaaccccttggaaaatctatcttgatatcttggataaataattaacatggttgatttacaggtgagaaaaaatgtcacttcctgagaggccctggaacctgaatatatttttgggaaccttgagaagagaagtattcactcaagtttaaaggtattacaggcacaatttgagggtgactcctccttggattggcttcccagcctcaagaggctttcaaaagtttaatctgagattccttgtgaaaagttccagcaaagcaaaattgaaaatgagcttatatgattaatcatcattttgctgtacttctgtaaattattaggcaaagtataacaagcctaaaacttattttgcaaacaaattagttttattgtgattaactttggtaaaaaggggggaactcga

SEQ ID NO: 542 - DNA, 396 bp, Homo sapiens
cagttgacttccacaagtgattactgagtggcaagcatgtaccaggtaccatgctaggcagaggcagtaaaatgatgaataaaacacagcagaatttacagtttggtgggatagcaaaacacagaaatagataactcagtataatgtggtgaatgctaagagacttagctcaaatcagcttgttttgaaaattttaactgttgccaagctactagtaaatgagttcaaattgtccactttagccttctaaaccctgattgtttctgtgcagttttaattctcattactatactgtgtgatctttctgattcagatccaaacagatttctcttttatgagccttattgtctcccatttctcaccttggatcttgaagccatagtaacatctttctca

SEQ ID NO: 543 - DNA, 600 bp, Homo sapiens
tttgcatccaaattgtttgacctttgtgcagtggctcccattatcaactggggaaccagtacaatctttacctagttactactgaggttgttctctctccatcacaaaatttcatgctatttatctgtgagaaaatgcctgaggactttcacacagtaattcatcttatctggaacccttaggatcacatgtagaccgagcaaatgtcaagttcacagagaacacctgtgtcttcagaacattaaagggcaccattagagcttgtttcccttcacttaacatgcacatttttggcataagttggggctgaatgatgttgtcatagcaaatactgctagaatgattgctgtactcattacactaccaaaaaaaagagagagatgaatgggtgtggagtgtcactaaccctcctcatgatcagcacatggagaggacaggacagggtgacattcctgaggaactggtaacccccagacagctaatatgctttatgacagattggtgggttggctatctccaaaacttctaagacatagaaattcagattgaggtcataggtattcagattaatctgtaacggtcttggaagattattatata

SEQ ID NO: 544 - DNA, 497 bp, Homo sapiens
tgttcttgcccacactatttgatccactgccacactctatgtcttatacatatatgactccaaatctctctcctgagctccagatctaaaaatctacatgcttagaagacatggaaaactcaaataatgtgatactcttgttatttcccaatgatataattattcaactgcttatccaaaccagaaacttgggagtcaaatcatgttttttattcatgtctcacatccaactgatagtcagctctgtctgtcctgcctctcaaatgtcattcctctatgattctctatcacagagatgcccatttgggttcaggcttccattgctcatcccctgcactattgaaattaccctcaaattagccctctaacatccaggtttgttctttttaatgtatacataaaacacattttagaatttctgtccaaaaatcctcttctttcatagttttctcctgtttattaaaaagtctaaattctgaatttaccacataggcctt

SEQ ID NO: 545 - DNA, 358 bp, Homo sapiens
gaacctcccagggaagatgaggagaggcagagaataacattaattctaaccaaaacccgtatatgttggaggaatgaacagatcccttttatagaacttgaaaatgagcctccaggaggttaaataagctgcttacagtttcacagctagaaacaggagaggcagaattcaaaagcacatctttctcattccaaagctcatgctctctgaggcatactccatggcggtggtgcactgtgagcaggaagggagtgcccttttccatctatctccctttttctttatctcttctcaagaggatgatagggaaatagaagtgacaatgaagatagagagattggagggagggataaggaaa

SEQ ID NO: 546 - DNA, 308 bp, Homo sapiens
gatggacacataagtaatcatgacacagaggctgggtgtggtggctcatgcctgcaattccagcacttcaggaggccaaggcggaggaatcacttgaggccaagagttcaagaccagcctggccaacttggcgaaaccctgtctctactaaaaacacaaaaattagctgggtgtggtggttcatgcttgtaatcccagctactcgggaggctggggcaggtgaatcgcttgaacccgggaggcagaagttgcagtgagtcaaaatcctgccactgtactccagcctgtacaatagtgagaacccgtct

SEQ ID NO: 547 - DNA, 351 bp, Homo sapiens
ggacactaaagtgagctttaatatttaatctaaaaaagataggaatgtgtatttctttatattagatgcaatcaaaagtttaaagaacctgaagcaaatgtgtagtaggcttataactggactacgtaccttaactactacttagaaaactaaagcctaatttaattaagtaagctactaaggatctgtttaaaaaattcaaaatttaaatccaaacccaggtctgactaatttaaaagtttgcattcttaagcgtgacacactctccttctgtgtgagagagttgaaagtatagatatttgtagatatagagtattttatgacaggaacttagaagtgacataattatgg

SEQ ID NO: 548 - DNA, 351 bp, Homo sapiens; identical to SEQ ID NO: 547

SEQ ID NO: 549 - DNA, 1694 bp, Homo sapiens
gtttcccatacatatatatgggaaagaattatatatatacacacagttgttggttaattatatccaagcattaaaatattgtattctaaatggccatactgcccaagttaatttatagattcaaagccatccccataaagctaccaatgactttcttcacagaattggaaaaaactactttaaagttcatatggaaccaaaaaagagcccgcattgccaagacaatctaaagcaaaaagaataaagctggaggcatcatgctacctgactttaaactatactacaaggctacagtaaccaaaacagcatggtactggtaccaaaacagagatgtagaccaatggaacagaacagagccctcagaaataccaccacacatctacaaccatctgatctttggcaaacctgacacaaacaagaaatggggaaatgattccctatttaataaatggtgctgggaaaactggctagccataatgtagaaagctgaaactgcatgccttccttacatcttatacaaaaattaattcaagatggattaaagatttaaatgttagacctaaaaccataaaaaccctagaagaaaacctaggcaataccattcaggacataggcatgggaaaggacttcatgactaaaacaccaaaagcaatggcaacaaaagccaaaattgacaaatgggatctaattaaactaaagagcttctgcacagcaaaagaaactaccatcagagtgaacaggcaacctacagaatgggagaaaatttttgtaatctacccatctgacaaagggctaatatccagaatctagaaagaacttaaacaaatttacaagaaaaatcaaacaaccccatcaaaaagtgatcaaaggatatgaacagacccttctcaaaagaagacatttatgcagccaacagatacgtgaaaaaatgctcatcatcactggccatcagagaaatgcaaatcaaaaccacaatgagatatcatctcacaccagttagaatggcaatcattaaaaagtcaggaaacaacaggtgctggagaggatgtggagaaataggaacacttttacaatgttggtgggactgtaaactagttcaaccattgtggaagtcagtgtggcgattcctcaaggatctagaactagaaataccatttgacccagcaatcccattactgggtatatacccaaaggattataaatcatgctactataaagacacatgcacatgtatatttattgaggcactattcacaatagcaaagacttggaaccaacccaaatgtccaacaacgatagactggattaagaaaatgtggcacatacacaccatagaatactatgcagccataaaaaggatgagttgacgtcctttgtagggacatggatgaagctggaaaccatcattccgagcaaactatcgcaaggacagaaaaccaaacaccacatgttctcactcataggtgggaaatgaacaatgagaacacttggacacagggcggggaacatcacacactagggcctgtcgtggggtgggggaaggggggagggatagcattaagagaaatacctaatgtaaatgacaagttaatgggtgcagcacaccaacatggcacatgtatacatatgtaacgaacctgcacattgtgcacatgtaccctagaacttaaagtataataataaataataaaaaa

SEQ ID NO: 550 - DNA, 204 bp, Homo sapiens
aaaagatctaccctagcctgatgctgctggggctggcaaagttatgtgagctcagaagttgagaccaagcctccatctcctctactttaagtggaaagttaacacagtctggaagagtcagccaggagtatcagcccgtttgtgttaacttgcttttattttttcttgctgaaaacagaagtgaattacactcttcactgaatc

SEQ ID NO: 551 - DNA, 204 bp, Homo sapiens; identical to SEQ ID NO: 550

SEQ ID NO: 552 - DNA, 114 bp, Homo sapiens
cagagtttcactcttgttgcccaggctggagtgcaacagcatgatctcgcctcactgcaacctccacctcctgggttcaagtgattctcctgcctcagcctcccaagtagctgg

SEQ ID NO: 553 - DNA, 279 bp, Homo sapiens
tcaatgattccaaaaaatcgatacagtttcaaattttaatttagatgtaattgtgatcatcactgtatttatatatccaagtgactacattttaagttgtagacaattgttatttagaggtatgaagaaaaagagggagctggtgggaagtttgctagcataggagaaagtaaaaagaagcttcaattttataataatgaaattaaaagtcttaaaaagtcttagagattatttagtatagtactttatttttttccttaagaaacaatcaaggcatgt

SEQ ID NO: 554 - DNA, 429 bp, Homo sapiens
ctcgaactcctggcttcaagcagtcctcccactttggcatcccagagtgctgagattaccactgtgcctggctcgttaactgtgtttttaaaggaactctttgtatgtgtgctgacaggttacccaaaaggagtgactttgagactttaatttacatagctccaaacagcatgtccaggtgaaagcacagatatcagaataggtatgatggatctaagagccaaagcatttcattctcattcattgtagtccaaatgaaagacatttgaatcatgcaacattttgaagaatttttaaaacatgcttttagattgttttacaacaaaattaatgatgtaaaggtagtttaaaacttgattaatacctgatttttactagttaagtaccaggcagcctttatttcaaactgggaaactattttaaatactt

SEQ ID NO: 555 - DNA, 360 bp, Homo sapiens
ggttggatggtggtgttctgggtctcattcctggaggcccagcttacagcttgctcttgcaaccctttcgataaatttataagcactcagattctctgaataaggtctcttttaaattaaataatgagagtattttatggctcctgtgactgacccttacctgatacacttccagtcacagtcagaatcaatctaaagtccttaccaaggcctaccagcccggaaccatccagccttagccactttcttactgtctctttcactgactctgcttaagctacatgtcacttttgcatttttgttcttccctgaacacactaagcttgccttacttagggctctgggacctgctgttcttat

SEQ ID NO: 556 - DNA, 360 bp, Homo sapiens; identical to SEQ ID NO: 555

SEQ ID NO: 557 - DNA, 493 bp, Homo sapiens
ccttttgccaccagcctagggttagggtctctgtcattttctctcatgctgtgctgtgttgtagctccctgtgagtctccatggtgtagtgaaatgagcaaggctctgctgtaagacaagtctgggctcaagtgctggcctacctcttattggggtgtcctttaccagctttcttacctttctcagcctctgatcaaagctcactgcagcctcaaccttctggggacaagcgagcctcccgcctcagcctcccaaagtgctaggactacaggcataagtgactatgcctggcccaagcctgttttcttatctgtaaaattggaacaacaacaaaaaagtattctttgtagagttgtgtgagaattagagataatgtatgtaaaaaatctggcaccagtaatgaaacacagtaaaactacaaaaggaaagcaagtttttcctctgttttccctacattaaaacataataacattaaatgattattctgactgta

SEQ ID NO: 558 - DNA, 337 bp, Homo sapiens
aaactaaacatttgataattatggcaggaaatatggaaggaattaaaaagcatgagggagaagaaatggaatgcacattacaaaagaaatagctccctggtgggtggtttatgctccctgtttgaattttttccttcatattacagtttaaccacacccttagcatcgcagcttgactctgcccaaaaaagtcataaatgcatacaaggtcttcacaatttttaaaaaatacgcattgtactgaattctcatttaattcactactacgttgttgattgaggtggaaactcaatcaactgtttttactgccaatgaaataaaagtagctaatatttat

SEQ ID NO: 559 - DNA, 337 bp, Homo sapiens; identical to SEQ ID NO: 558

SEQ ID NO: 560 - DNA, 357 bp, Homo sapiens
tgggggggcaggcaggcggggaaggagaggtcttaaggggcggcgaggggaggtcgcatttcctccgaggctggcgatcggcggagctcccacctccgcttacagctcgctgccgccgtcctgccccgcgcccccaggagacctggaccagaccacggtgagcgcagggcgcacggcgcggaggccggactcttcgggcggccgggggtgcttgggcggccggagcgagcctgcgggacccgagcaagtttcccaggtcggcgcggggcccggcgccttcagactcgctctcttctctcttccgcagatgtggaaacgctggctcgcgctcgcgctcgcgctggtggcggtcgcctg

SEQ ID NO: 561 - DNA, 429 bp, Homo sapiens
gaccagaacattggtatgcggcacatgactgtagatcttctcattaataataggcaacctggtcaggtgcacgaagtctagggttcagaatccaacaggctcaaattcaagtccagctcagccacgtggctgagtgctgtctgaacctcagcgtcctcagctgttaaacagaggtaaccatccccatctcagcagctttgggaggaaattaaatgagatatattgggatccagataaccaataaaatatcaaatcactttaccagttcaagctcttaccactcagtgattgcatggacttatcactgacgaatgaactcaggagttcaggagttcgagaccagcctgggcaacatcctcacccagctaatttttgttttgtttggtttggttttgtttttgagatggagtctcactctgtcgcccagct

SEQ ID NO: 562 - DNA, 508 bp, Homo sapiens
caggccatcctcacattctacagaggttaacccagcaacttagggacacagctggggcaggactcccgggctcctggtcagtccctctatggggatgctaagcctcagggctgacatctcttagctctgccttccagggagaatttcacagggcctcccatttgtgctgctgtgaaggccgtcctgctccttgtcaagcctgtcttctccgtggcttgaggaagatctctttcgtgcccaaattgtgaataagtaaactggatgcagcatctctgattgctctgggaagaaatttatgagaagtgcctgagaaaagtcatgattttatgcctctgctaagcaacctgttggacactgcttggtatctacagctaagtggttccctgttcagacctgcttcctctgattagcagccacagatcttctgggttttcacttgtttatttctgtttattgtcatctctgggaagatggcttcaaattttttatcccccaattatttaacccc

SEQ ID NO: 563 - DNA, 353 bp, Homo sapiens
tcacagcaggaggtgaggagtgggtgagtgagcaaagcttcatctgtatttacagccgctccccattgctcgcattaccccgagttccgcctcctgtcagattagcagcagcattcgattttcataggaacacgaaccctattgtgaactctgcatgcaagggatctaggctgtgcactccttatgagaatctaatgcccgatgatctgcggtggagctgaggcggtgatgctggcactggagcacggctgcaaatacagataagcattagcagagaggtttgactgcacagagaccatagtaagtcagttgcttgcagactcatatcaaaaccatatctgtgagtggcgggt

SEQ ID NO: 564 - DNA, 368 bp, Homo sapiens
ccacttctgtccatgcctctttcccacactcagcacgtgtctcagtcacagtttgggtaagtccaccggctaaccctagccagaatgagtaagaaaaaaatcaagcgtctctggagagcttctttgaaaagggggaaaggcccaatggtgaaacagcagaagactcaaagaaagttgcatttaaaaggaaacagcaagagccctgcttcaattatggattcattgcaacaagtgattcatattccccaagccctctttgcataatatgtgaccactggctatccagtgaagccgtaaaaccttcaaaaccgcttcgccacatggagaccaagcaccttgcattaaaagacaaacctttagagtttttc

SEQ ID NO: 565 - DNA, 477 bp, Homo sapiens
gggattataggcgtctgccaccacgcctagctagtttttgtttttttaatagagacgaggtttcaccgtgttggccaggctagtctggaactcctgacctcaggtgatatacctgccttggcctccataggtgctgggattacaggtgtgagccaccgtacccagccagttctgttttcttaattgtatacataacacgcagtgagcaccatcacagagaagtttaaccacagatctgagaatcatggaatcatttcatcataaccactgttactcggaatctttatttcactcttgttcaccacctctttccaaaagaaatttgaggtaataaaggacaaaaggcaaggaaaagtgagatgggaaatgcacaaagctaacagtccactaaagctaaacctgcacctatcccatgatctaggagttccactcctgggtgcagacccaaaaaaatgagtgcctgactcaccaaaaaaa

SEQ ID NO: 566 - DNA, 357 bp, Homo sapiens
caaattctggtgataaatattataatttagtctgaccttggcctgaggtttataaagaaatactgttaaacattgctttctgttcaggtaaatatatacacagaaatagaatagtatactctcctgcaaaagaatgttatttactttcattttgaaggatgttgtcttaagcctgtttttctgaactccacttaatgacccacactgatgctctggtttgacaaacaaaatcttcagatttgatgattttgttaatttctagagcaggctcaggtgaaaatatcagccagtgattctgaggtgttgcattcctatttttaaagcagtcattaggtaggactgatgtaggcaatgaaa

SEQ ID NO: 567 - DNA, 357 bp, Homo sapiens; identical to SEQ ID NO: 566

SEQ ID NO: 568 - DNA, 1082 bp, Homo sapiens
gtttttctgagaagtgtgggatagaacccttattttaaatggacagtttatcttaagacatccagttaaaataggaaaaaattaacatctagaatctaattaatgaggtttactctaagatttgtttaaaaatatgccttttaaaatctatttgtctctttgttttatttgtaattttagcgagatgaaatataattttgatagaccattcatttataacttttgtaattggcctctcatgcttttccttatctttttttgtgtcagctatgtgtaaatttgaaactaattatgacaccaaataaagaatccatttagggtgacctcattggaaaacagcatttttgcagatactcactctccttttagcaaatatggttaaattaccattttgaatacttctagaactatgaagaatggtggtgattcatgatatagaattttgataattactaaaaatcattttgtcaatttttttccagcaactttctgatgtagcagtctcttgatatacaagagggatatggtgagaccttgaacttcagctttctgtaattccactggtatatgttataacttcacaggctaactttctctatacataaaaggggagtaattgtatccactgtcaacttgtgaggaccgaaggataatcaaatgggaaatggggagtgtgtggttaacactttgtccactgcctggtaatggcgattcagtcactgctaacacagaattagaaatgacacgtgttatgtattttctggtcacctgagaatagtcagaaccattagcattgaaagccatgagtgccttgggtcaagagtagcttatgatgacatttatttttatagttaaagaagtggagacagaatagatagaatggttacaggtaagtgtaaacacattattttctttattaaagaggcttttcttgcttgaaaacatttttgaaaattgccactggccaggtgtggtggctcacacctataatcctagcactttgggatgctgaggtggaagcttgggcaacatagcaagaccatatctcttaaaaaaaaaaaaaagaaaaagaaaaaaagaaa

SEQ ID NO: 569 - DNA, 605 bp, Homo sapiens
gaatccatcaattatatttcatatgagaagtgaaataacaattgtgtattcctccatggttaggggttctgaataatggcttaaatcagatgggttatcaactttatgacctagcccagttgctggtatctcaaatccgttttaacaaatatgcactcgggtagtggaagctttagatattaaaaaaataaaagccctcactgacaaagtggcaataaattattaaaatgctatgtttttggaattcaggtagattctttttgagaccatcatagagaggaatagaactttgctgtcctttttgttttccttatccatgcttttgtctcacagcaaaatatactatgactctattttaaaaaatggtctacctgtctgtgaacttctgtctcttgcaactggaaattttgcttgtgtctgtctgcaaaagagggaaacaaatagatatcagggatttataaaagctatctcaatattatgacatactagtttacaatgtttgtcaatttcaggtacttttgacaactgtgaaaccggaagaatgatggttgatgttcaaagagagagttttatttatatggagctaaattaaaaaaattttcatc

SEQ ID NO: 570 - DNA, 1082 bp, Homo sapiens
gtttttctgagaagtgtgggatagaacccttattttaaatggacagtttatcttaagacatccagttaaaataggaaaaaattaacatctagaatctaattaatgaggtttactctaagatttgtttaaaaatatgccttttaaaatctatttgtctctttgttttatttgtaattttagcgagatgaaatataattttgatagaccattcatttataacttttgtaattggcctctcatgcttttccttatctttttttgtgtcagctatgtgtaaatttgaaactaattatgacaccaaataaagaatccatttagggtgacctcattggaaaacagcatttttgcagatactcactctccttttagcaaatatggttaaattaccattttgaatacttctagaactatgaagaatggtggtgattcatgatatagaattttgataattactaaaaatcattttgtcaatttttttccagcaactttctgatgtagcagtctcttgatatacaagagggatatggtgagaccttgaacttcagctttctgtaattccactggtatatgttataacttcacaggctaactttctctatacataaaaggggagtaattgtatccactgtcaacttgtgaggaccgaaggataatcaaatgggaaatggggagtgtgtggttaacactttgtccactgcctggtaatggcgattcagtcactgctaacacagaattagaaatgacacgtgttatgtattttctggtcacctgagaatagtcagaaccattagcattgaaagccatgagtgccttgggtcaagagtagcttatgatgacatttatttttatagttaaagaagtggagacagaatagatagaatggttacaggtaagtgtaaacacattattttctttattaaagaggcttttcttgcttgaaaacatttttgaaaattgccactggccaggtgtggtggctcacacctataatcctagcactttgggatgctgaggtggaagcttgggcaacatagcaagaccatatctcttaaaaaaaaaaaaaaagaaaaagaaaaaaagaa

SEQ ID NO: 571 - DNA, 605 bp, Homo sapiens; identical to SEQ ID NO: 569

SEQ ID NO: 572 - DNA, 90 bp, Homo sapiens
gatcgcgccactgcactccagcctgggcggcagagagagactccgtctcaaaaaaaaaaaaaaaaaaaaaaaaaaaaaaaaaaaaaaaaa

SEQ ID NO: 573 - DNA, 3098 bp, Homo sapiens
ctcatatttttcccagacgcggaggttggggtcatggcgccccgaagcctcctcctgctgctctcaggggccctggccctgaccgatacttgggcgggtgagtgcggggtccagagagaaacggcctctgtggggaggagtgaggggcccgcccggtgggggcgcaggactcagggagccgcctccggaggagggtctggcgggtctcagcccctcctcgcccccaggctcccactccttgaggtatttcagcaccgctgtgtcgcggcccggccgcggggagccccgctacatcgccgtggagtacgtagacgacacgcaattcctgcggttcgacagcgacgccgcgattccgaggatggagccgcgggagccgtgggtggagcaagaggggccgcagtattgggagtggaccacagggtacgccaaggccaacgcacagactgaccgagtggccctgaggaacctgctccgccgctacaaccagagcgaggctggtgagtgaacccggccgggggcgcaggtcacgaccaccccccatccgccacggaccgcccgggtccctcagagtctccggatccgaaatctaccccgaggcagcgggacccgcccagaccctccacccgggagagtcccaggcgcctttacccaggttcattttcagtttaggccaaaatccccgcgggttgggcggggagggggcggggctagctgggcggggctgactgcggggaccggctagggtctcacaccctccagggaatgaatggctgcgacatggggcccgacggacgcctcctccgcgggtatcaccagcacgcgtacgacggcaaggattacatctccctgaacgaggacctgcgctcctggaccgcggcggacaccgtggctcagatcacccagcgcttctatgaggcagaggaatatgcagaggagttcaggacctacctggagggcgagtgcctggagttgctccgcagatacttggagaatgggaaggagacgctacagcgcgcaggtaccaggggccatgggcgccttccctatctcctgtagatctcttgggatggcctcgcacaaggttgggaggaaagtggacccaatgctaggatatcgccctccctctagtcctgagtaggaagaatcttcctggctttcgagatccggtaccagagagtgactgtgagagtccgccctgctctctgggacaattaagggatgaaatttctgagggaatggagggaagacagtccctggaataccgatccgcggtcccctttgagccctccaacagccttgggccccgtgacttttctctcaagttttgttctctgcctcacactcaatgtgtttgaggctctgattccagtccctcggcctccacttaggtcagggccagaagtccctgctcccccctcagagactctaactttccaaggaataggagattttcccaggtgtctgtgtccaggctggtgtctgggttctgtgctcccttccccaccccaggtgtcctgtccattctcaggttggtcacatgggtgctgctggggtttcccatgaggagtgcaaagtgcctgaattttctgactcttctcagatcctccaaaggcacacgttgcccaccaccccatctctgaccatgaggccaccctgaggtgctgggccctgggcttctaccctgcggagatcacgctgacctggcagcgggatggggaggaacagacccaggacacagagcttgtggagaccaggcctgcaggggatggaaccttccagaagtgggccgctgtggtggtgcctcctggagaggaacagagatacacatgccatgtgcagcacgaggggctgccccagcccctcatcctgagatggggtaaggagggagatgggtaaagaggggaacgaggggtcatgtcttttctcagggaaagcaggagcccttctggagctcttcagcagggtcagggctgaggcctggagatcagggcccctcaccttcccttcctttcccagagcagtctccccagcccaccatccccatcgtgggcatcgttgctggccttgttgtccttggagctgtggtcactggagctgtggtcgctgctgtgatgtggaggaagaagagctcaggtaggaaggggtgaggagtggagtctgagttttcttgtcccactgggggttgcaagccccaagtagaagtgtgccctgcctcattactgggaagcaccatccacactcatgggtctacccagcctgggccctgtgtgccagcacctactcatttgtaaagctcctgtgaaaatgaaggacagattcttcacttcgatgattatggtggtgatgggacctgatcccagcagtcacaaatcacaggggaaggtccctgctgatgacagacctcaggagggcagttggtccaggacccacatctgctttcttcatatttcttgatcctgccctggatctacagttacacttttctggaaacttctctgggatcaaagactaggggtttgctctaggaccttatggccctgcctcctttctggcctctcacaggacattttcttcccatagatagaaacagagggagctactctcaggctgcaggtaagatgaaggaggctgatccctgagattgttgggatattgtggtcaggagcctatgagggagctcacccaccccacagttcctctagccacatctgtgggctctgaccaggtcctgtttttgttctaccccaatcactgacagtgcccagggctctggggtgtctctcacagctaataaaggtgacactccagggcaggggccctgatgtgagtggggtgttgggggggaacagaggggactcagctgtgctattgggtttctttgacttggatgtcttgagcatgaaatgggctatttagagtgttacctctcactgtgactgatacgaatttgttcatgaatattttctctatagtgtgagacagcttccttgtgtgggactgagaagcaagatatcaatgtagcagaattgcacttgtgcctcacgaacatacataaattttaaaaataaagaataaaaatatatctttttatagataca

SEQ ID NO: 574 - DNA, 320 bp, Homo sapiens
tatgaatgtaaaatgtggaaagctatttatgctttcctttaacccttattttattttttcctgttgtgtttgggttaaatgtaaattgtattcatttgttgattttaatatgtgtgacccacacagaaataattttatttattgaacctcctgtgggaagatgcttaatagtttataaatataaaattgtccccaacactaccagatgatgctaaaagatttatagtttatccatgatgttcagttttgttttttccattaagttatcatggttcaaattatccattaccaaaaacgtcatgagaaagatgcatgagatc

SEQ ID NO: 575 - DNA, 145 bp, Homo sapiens
cccattgactagttatgtaaaaaatctcacccctagatcacaaaagtttgactctgtaagagaagcaggtcattgtgcacaatgtcctcaggccactggaaaaaaagctcatatcctgatgcggtaatcttcctccacttaaaaa

SEQ ID NO: 576 - DNA, 394 bp, Homo sapiens
ctgcatggaactgcttccaaggcatagatttgattattctaccatctctgattcaatggaagaatttcatctcataacttagaagcttgactttacctgtttacagcaatacttcacatttactataagatttatctcaaaagtctcatatctgcaatgtaagctatagttagataagccatttatcaaggatgattttacttttatttacttttacttatttttaatttattttaattaattaatttttagagatagggctttattccatctccaggctggggtgcagttgttggatcgtagttcaccatcacgtggaactcctgggctcaaaggatcctcccacctcagcctctctcccaagtagctaggactacagatgcatgccaccacc

SEQ ID NO: 577 - DNA, 15054 bp, Homo sapiens
ttggcctttcttcatagtctgttcatttctaacagcctgactgtggagctcacacaggatttcctcccatacaaacaacagctccaactcagtttacagaatgtgagtttgcatgtggatttttctcaccggtctttccattccgattgaatttcagccctagcgaccttgattcttggaattctaggttactgcatcctagccaatttgttagaatatactggtgtggatcacaaatatttagtatatcagactgttcttgctcttccactttcacatctttcctgtttttgaggctgactgctgttcaaacccacccttccacacaccaacaccttcatctatgcaatatttattaagtattgctaatttgctgcatctctctcagatcaggacatagctataggcttatttgagcccaggccttaagctacttccctgctcagtcaaaacactctcactgtagactttattaccacaaacactcattttatcttctctttcttttctcagtacttattagtagagtcacataaattacttttaaaggttttctctaccttctttgtcatgctggttcttacagatgggcatgtaggcatagtgttcccatccttttcacatatattcctttacatgttcctttattcaacccacattaaacaaatgtttatggaaaaaatgaacataagctctgtgccaggcatgtgaaaggcactggacatgccatgaagatgcatgcaagtttttctgtcttgaaggaacatacagtttcttgtaggagacaaataaacagagataaattataatccattatgataagtgctataatagaatcaaggccaaaggtttttaaaaagttcagagcatttggctacctggtagagtcagagaaggcattactgagttggtgactttagaatgggtgttaaattgcatgaaatatatagatgtagttttagatgaaaaatgctggtaagttatagtgaaaaataagccccccttggttgtttaggaggattgggatttacagttgttgttattattttttctttctatatactctccttgcagaaaggaactaggggctctcacattctccagaatttcctgatttacaacatcttcctactacaaccaagttaatcccatgaatcttcctctatatattacttgatatgtacaaatgtaacaataagcctttgaatgtgtacatatgggtgacttatttacaggataaacatgagccaactagatgggcagcacagatcacctttctcactaacatcatgtcataattttaagactgggtactaaaaacttatctgtagtgattttcatacccacatttcaacacatgtcttaccattgtgttttagttgtgtagatttaaatagatttattctcatcattaggttttggtatttgtgagtatgaaaacatagctactgttggcccttctcccaagagagcaccctctcgtatattttatgttcttggccagaatttgattcagtatcaactaggctgtaactttgagacacaatttggaagttgctatgagaatgctacctttgggaaccttgtctgccatctcccttgttgtaaagcagggtatcagtcatgttcagaattctaagattgcttatttattagggccttatgtgattcgtattagtaaaaagcctcccagttgttattttatgagtatattgctcgttatatttttgtttcctatgcagtctttaggaccgttagactctataaacttgttttccattcactatgccattcaccatttctttttttgctttgtggttgcacatgctgtaagcagggaaaactttgtactgagtctctgaccaagaaatactttttcatgataatgatgatgataataatgattttcatgatgatgtcttgacagacaagaaatcatttctccagtacccgggaagagatggaagaacttaagaaaaggatgaaagaagctccccagacatgcaaacttccaggacagccaactattgaaggctatctctatacacaagagaaatgtgtgtggggacataggggtatccattgggtttcaataagccaggaactactgccacttgtcggctgtgaattttgggcacccttactgttcatagacccctgatagctaaaattcccttggaacgcaggcagggaatactgaaaacaaaaaaaaaaaaaggagaaactgagaggaagttaaagatttgtcttacaaaggctgtgtagtgataagacctaaggttttctctgagattcaaaatgggtattatttgttctttaatccttctgattattcttttggaaaaaagggaagtagaggaaaggaagtagaaaaataatatttcttatacttattatgtaccagacatggtgctaagttcatttaaaacactgcctcatttaatctttgcaaccaatttatacccatacacataaggccactaaggctcagagacgtcaccatttgaaagtcacccaactaacaagtgtcaggactaaaattaaattcaggtctatgaaatgccaaagcccatgatcctactatagtaccctatatcttcgtctgcattagggtcatatgtttgctcttttcttttctttttttaagacaggatcttgctctgttgtccaggttggagtgcaatggcaccatcatagctcactacagcctcatactcctgggctcaagcagccctcctacctcagcctcctgagtggctgcacctaaaggcacctaccactacacttggctaagttttgaattttttgtagagacaaggtctcactatgttgctcaggctcatggatgctcttatagcacttagtgaacatcatgattccagtgggaaagacagtatctgtttttcattggtgactaagtaaagtgggttaacttgtttagtcactgaatgttgcagagcattcaatctttcctaattcctcagtaacattatgcacacctgtatgtgtgatttgattttatttgccctttgaactatgacccaatactccccaaacctgttattcagtttttgcccagagttattatatctggggaataaacagaggacacacacccagaggctgccagtagcaaaaatcactgtaattcaaaaagcatgacactacggtagtgaaattatcacacttttctttgcatagagcagtttacttgtgatgattttcaaagatgtgttctcccacttgtcaggttcatctcttcaactgtgtgtcgcacaatttctcgatctcagtgctgttgacatttcaggctggataatttttagttctgggaagtggtcctgtgtattatagtatatttagaagcatccctggcctcctcactttgtgctcatagtaatctccaggtgtgacaacctaaaatgtctctaatgtattgccacatgtcccctgggaggccaaattacccctagttgagaaccactgctgtatgctgtgtgatccttctgtgcttcagtattctgatttgtcatatgggcataacattgctactcagttgaatgtatgcttaatgagcactgtttctgccagatactgtgcaatgcattggggacacccttgaaaaactgaatcaaccatgatttctttcaccaagaagtgtaaagtgatgggagagatagacaagtatatcaataattataatgaaatgtggtgataactgtatttggggcatatatctaaaggcttcacaaagaaagtgatatttgaactagaacttgaatgatgagtgggagtttgataggtaaagaaaaggaggaatggccgggcacagtggctcatgcctgtaatcccagcactttgggaggctgagacggcagatcactggaggtcaggagtttgagaccagcctggccaacatggtgaaaccccgtctctactaaaaatacaaaaattagctggatgtggtgatgcttgcctgtaatcctagctacttgggaggctgaggcaggggaatgacttgaacctgggaggtggagattttactcagccgagatggtgccattacactccagcctgggtgacagagtgagactctgtctcaaaaatgaataaaagaaagaaagaaagaatgaaagaaagaaaagaaaagaaagaaaggaaagaaaaaggaaagaaagaaaggaaagaaaggaaagaaagaaagagagagaaagaaagaaggaaaaggaggaagggaattccaggtatataccactgcatgagtaaaggcagggttgtggatagacatagttgatttgtagggcccttgtttgccaagaatagtcctgctttacccctgttgtcctgatgtaattattaataatactgcctcattcagtcttaaataagtcttggatttggactagaaattatatggctacctctttatgtgggaactaaaagtaattcattgagacaggaacatagaggtgaggtgccaaaagaaaaagctagaaaggtaagttttgatcatgttatcaagggcattgtaggcaggctaaggagtgtggagatagtgggaaagccgtggatggtttttaatgaggggaatgataaaaatagagatatattttaaaaataatctaggaaaagagtggagaatgaattggagtggagtgatcagagatggggacaatagggaaatcagagaaggccaatgaaataattaattggtgagatagtaaatttttgttttttaaaaatatgtttcataaaatataaatacaaaataagacactgggcccagcgctgtggctcatgcctgtaatcccagcactttgggaggctgaggcatgcagatcacgaggtcaggagatcaagaccatcctggctaacatggtgaaaccccatctctactaaaaaaaatacaaaaagttagccgggcgtggtggtgggtgcctgtagtcccagctacttgggaggctgaggcaggagaatggtgtgaactggggaggtggagcttgcagtgagctgagattgcgccactgcactccagcctgggtgacagaacgagactctgtcaaaaaaaaaaaaaaaattaaaacaaaaacaacactgatagggttcttaactaattcggtgttaaaaaggaatggagaggaggagacagttaaaagagagatgtgtagagtcatgtacaggttagaaggggcataacccaatgaccaatgacatggaacagttatagagacagcaaagtaaatgacaatagtctccagcttctgggatatatggtgatacaatttatagggaacatggcagggagagtaggttttgagcaagccagaagcagctgtgggaagcagttggtgaaggttagaatctccctgtgtgcagtaggtaggtggctatggaaggagggcggtcagggcaagggcagggctggatctgaagtttggctctgaagagcaatgtgtaaatagcttccatcttagggttgacttcctatacagctaaaatagttattctgtctgctcacttttacttgtccttgtaggggctttaggaatatcctgggtgaaatactattgccagtatgagaaagagaccaaaacactgaccatgacgcctatggagcagaagccaggtgctaagcaggtcagttcttgtttgcaccatatttttggaaatggatctatgactgtttctcagaaaagaatatatgttgacctagtatcaaatcatcaagttcatcactgttacgtgaggccatgactttatatgtacaccttggcctaagtttgagtcagatagcactgagttgagtgaaaaatttctctgttgattagagcaagccttttgaaagtgccggtagtctttcaaaccagttatttttacaagtgccagtcacattgtacagtcaactatgtaaaaatatggatgaattacttttaagaatgctctactcttggattctttaaaatagcaagttttaaaaatatgaattgaattccaaaattccttttttacaggagtgtgtttatggcccacagttggaataaccgatactcacattctatgtactactcaaatatctttaagcagttaatctctctttttctgccctccaaaccttctcttcacatcactgaaacactgacacagactaaactttaaccaccacttgaaacaaaactacgtttacattaaccttgagaaagacaccctgaatcctttatacgaaaacaacaacaacaacacaacagcacaacaacacaacaacacactcacacacactcacacacacagatacacacatgggggttccttaagataaaagctgatctttagacagattgtttatattctaaaagtagttcaatgtgcctctttcccctttaactggctctcagacagggtcttagtgcatgatttttaagcatttgcactctttacaaattgtttgttggaagtgcttcaagggttatttgttagcactgaaagtagtacatgaagacccaatttaggtagggaggaatttggagaaaaattgggacagtttctctcccttgctgatccttttcatggaagatctctcttgtgtggcttgctcatgttgaattagagaggatggaaatgtgctttcaggctactgaaatttttttggagtgagagtggtcttttaaccacaagatttagctccctgctttaatgtgctttggtgatgggatggacttgtaaaagatgttgtatcaaacagagtttctggaatcctcggctatgctttattattattgttattattattattattatttgcgatggagcttcactcttgtcgcccaggctggagtgcaatggcacaatctcggctcacagcaacctccacctcccgggttcaagcgattctcctgcctcagcctcttgagcagctggtattacaggtgtgcaccaccacacccagctaatttttgtatttttagtagagatggagtttcaccatgttggctaggctgatctcgaattcccgacctcaggtgatcctcccgccttggcctcccaaattgctgggattacacgtgtgagccacggtgccagttactgtgcttttatcatgggccagttactcattcaaaaccctcctcagtttccagtccgccagttgccaaagcacctttcagtgtggttccaataaattcatcctgtgttttagcactgatttgttccaagtcagtcagaacttagctgattaatctgactaggaagtgcttataagcaacactggcctgcagtctctttcttttatttttctacacacattacttttcaaataccggagaggaaagctccttttgtaggcagtaatttcatttaggcactttctctgaggctgctcagaggtgcttattgcaaactccaagacagagtcagcagataccactttcatatcctcctgacagatgccagcaagccctccttttagtttttctttccctcttctcttttcattgagtagctgcttgcaaaactgcaatggtggtggcctgagcatttttgatgtggtattccttatggaatggaaagaagaacttagttactcacaaggcagagggaggtggtgggggttacttggatttccccaaattggagttggaagtgatttcttcctgtcagttctctgtttcacttcttaatactagtttgtattttacaattataaattttacaaataaatgataccataataataagaacactacaaaagccactatttcttgaatacctgctgtgtgccggacactgagctagacccttctgtcatattcatgctcctcatttaccctcctagcagctatgtgaagtcagtgcccccaatttgtgtaggaagtgagaccaagttgaagatgcaggaattggccatctttctgactatggcacttactatagcgttggtcccactactttagcctgtcagctctcatctgtgttttcatggtcaattttctgatcatcttctcaaatgataatttattagatcttcatcccttccctgttaggaatttgtggtcagaagaaggagtactgcattctgaatcttcagacctgtgtttaaattttagctctgtgatctggtagcttttgaccttgagtaaattgcctaatgttactcagtcttagtttcctcatcagaaaagtggtaaggatgataaagtagttcataaacattcattgagcactaagtatttgcaagatactggaggtataaagatgaataaaacactgttcatgtctttgaagacttcctagtcaagtggtgaaattaaacataaaaacaggacattttaatattacgtgcaaagcacatagtgggcaatgtgttggtttgaagaaggatttttgaggaagtggaagctgaactgcagtttgtagaataagtaagagtttagtcaggcaaagcagatagacaaggtcattttgggtggagcgattaatataggcaaagtcatgcaatcatgaaatagcatgatatgtatgtgaaataagagtacttttgcattgtaggggcattaaacaggtgagcagtcactggagatgagattggaatggtgggcagggcctaggtccctgagctgcaatgtcattgaagctgaggacattgagaatttaaagagatagagtgagtctgtgactttgctcataactctcattttgaaagactaatgtgtgacatcccacatttaggggtaggaaggcatactgaaggattaatttagagttgagttgttacagtgcaggagcaaggaaagattggcctgcaagtggctgagtatgctgatgagcaagaagtattgggtaatgagccacgtgggccagtttgtatgtcatagtatctaggcacctgggcagtgttacctaacttgagataccacagtgggttttgttattcccatttaatagattgtgaagttaagacttagagatggaatatgatttatttatttatttatttttgagacagaatctcactttgtcacccaggctggagtgcagtggcacgatcttggcgcactgcagcctctgcctcccggtttcaagcgattctcctgcctcagcctcccaagtagctgggattacaggcgcccaccactgtgcctaatttttgtatttttagtagagacggggttttgccatgttgaccaggctggtctccaactcctgacctcaggtgatccacctgccttggcctcccaaagtgctgggattacaggcatgacctgctgtgttttggccagggtcacatagctggtaaatggcataactgagacaagaccctaggtcttaaactttctagtgtgttgctatttccactataccaatttggatgactttgggtatgctgctttacttctttaagtgtcacttctctataatggttgttaacaataaaagtggcttaaaaatacctagcataggctggacacagtggctcacgcctgtaatcccagcactttgggaggctgaggtgggtgggtcacgaggtcaggagttcgagaccaccctgaccaacatggtgaaatcccgtctctactaaaaatacaaaaattagccgggcatggtgcgcacctgtaatcccagctactcaggaggctgaggcaggagaatcgcttgaacccgggaggcggaggttgcagtgagctgatatcgcactactgtattctagtctgagtgacagagcaagactacgtctcaaaaaaaaaaaaatgtagcgtaatatatggcacatagtaagtgataaatgttacttctctttcctgtatcacatggtctctgttgagataagagagggaatctgaacaaggtgagactagaattttagtctgtggacacagtgggttttaattcccttaattacctacaggactaaagtgggccacactgtccttgctgcacatatgaaatatcaaatgctaccatgactaatacacacatttgctatttcctctacttttgcgctacctttggagcgattacatttgtgatttctgtcatcctaaagagtctagagttgggagacagaaatgtttttctccctccttcatctgccactttaatggaagcttctttgctcagctaccctctgactttctaagggaggttttagacagccacttaccccgtcacaatttccctccccagaggcctcatgaaaattttattctgtacacttaatgccattcagtcagcccatttctcctacactccccttacatgatatgtattgagcttcctattaagtcttccgtcttgggaaagagtgctggatgactctgaacaatttctcctggtctcagccattgattcttggagcggggagaaaccatctgccatcttgctgcaaatactgtttgaagggacaagattctcagtgagtctacacattgctcctgctgccttgaccagacgccttccaagtgacactgaagacactgtaggaagcagaaacagcttctgtgtctttttttaaaaattgcctgttaattcttgtttcatatcaggggcccttggacttaacactgaagtactgtgtgagaaggaagacggagtctatcgacaagaggttctgttttgacatagaaactaatgaaaggtaagctgtgccgctgtgaattggcaatgtccccacgtgccagatgcttagcctgggtaggtcttttattttcctccgtcatcccacgttgatgacaatgagtaagtctattcaggactttgttgtgagtctattcaagccagctcttctggctgcccttcccagggatccctgctagacctggcccagtgctgcttttctctgtgcaagcttctatcagctttgcctcacttgctctgggaagaaaaagtctctcctgggatttaatttgctatcagatgtgcaaaaggtcaacatttggtgatcttgcaagaaggaaaggataacaaagctcattctttgttaaatctcctaatatcacataaaagaacaaatgaattggcacacatttttgagggagggaagatggggtggagggtcgtggtgttattagaaagtcatttccccccatttggtgcaaaaatgatgcagaccttccctactttacagatactcaatgaactggaaatagtgtgattatcacctttcagatcttacagctaaggcttgcacattttggacttcgttgtgtttgtttctccccagtgccctctttttttacttgaacctgagcagttttatcagaggagaattttaaccattaaaatttcaaatgaatgcatttggcattattgtggagaaagacatgctttatagttgggtggttgtaccaaaataaacagaataaatctgtttctagattttatctcaaccttttatttctagatgttagatacttagtaatagaatagaattttgcaaaatgatcagattgctagaaaggaacttgaagggtgaattacaatatcatgtgaacaaaactagcagtgactgggatcataacaatcagactaaatgatgagggcatttttaaaaaaattggggaataaaggacttagcttgtttccttatttcaaaattgagagattattatttgaccctcacaatttcgatttgtgaatttatatcatttctttgttaaaaatggatgatcccaattgaggtggctctgaaagtacgtattgttgccagtaaccatgagactgtcactcattttcctgatagcctcagttccagtaggaaggggaaaattattgttggctgtggcttcccttttttgcaaataatatccccaactcaagcagttgcaaacagtttgtccccgtggttaggggctaggatgaatttatgtttcttgtacctggtgctatgcatggctcatgataagtactaaatttgatgtttatttttaagtgtttttttcttatcctagaatgctgaagaattttcgacactagaacccagggattaaagttttgatgcatctacacttttagttatcatatactgtgcactttacaaaacattccctcatttaatctacaccccccccattttaccagtgaggaaactgagacccacatatatttaactgacttgcccaactaaagtcacataggaaatggtgaggctgagctcaaaccctggtctgtaggtctccaaagcccatgctggtttctttttgtttgttttgagatggtgtctctctctcttgcccaggctggagtgcagtgttgcacaacctctacctcctgggctcaaacgagtctcctgcctcagcctcctgagtagctgggactacaggcgtgtgccaccatgtccagctaatttttgtatttttaatagaaatggggtttcaccatgttggccaggcttgacttgaactcctggcctcaagacatccacctgcctcggcctcccagagtgctgggattataggcgtgagccactatgcctggctccatgctgtttttaattttttatattgtctattataagcagaagaaacaagctgcaaagtagagcgttaaatataataatgaacaggtgctgaggcccctctctgcatgtggagtcttttgagtgacatgacatctgcttttctggctagtcagtctgatataaggaacagagtcaggcttcctagcaggcatcaggcagctgtactcacattccctggagcacagagcaaagggctcttggagccactttttctatgtcaggaagagaggataagattttttatttttttaacttttaattttttagagagagggtcttactctgttgcccaggttggtttgcagtggcacaggttcaagtgatcctcttgcgtgagcctcctgagtagctgggactgacaggtgtgcaccaccatatctggctaattttttattttttatagctatgggaccttgctatgttgcccaggctggtcttcaactcctggcttgcagtgattctcctgtgccagcctcccaaagtgctcatattacaggtgtgagtcactgcacctggttctaaatttaggctcttagcagtatttaaaatgacaggctcatagcaaggcagagcttgaaatgttttaataacagcaacaacaataattgtaataataataaaaacaattgctaacatttgccaagtacctcctttgtgacaggcactgttatcagccatttaagcgtataatttcctttagtcgtcaccacagtcacatgagggaggtgatgttatttgaattttggtttgtgaatctgtatcatttttgtgttaacaatggatgaccccattcaagatggctgtggaagtatatattgttgccagtaaccacaagactgtcattaagaggtgctttaatgaagtaagagaaggtaggacaggaaccccatgattccagcaggtagaacaggattcctgtgatatcagtaatggaaaggacctcccagctcctgtgttccagaaccctttcagataaagaaactgaggtctagaaaggcctagttacttatccagggtggctgaactctcttggcattgcttttatcattctatgactctaggagaggtctcatcttatcacagaatttgtggaaggaacaatgttttcctaatggctcagcaagccaggagaatgcaaggagactttataccttgcataaagtatggttaatctcaaaattccagatgagtcacaaagatctaaaaagaccataaagagcataacagcttgggatatctctgggtagttagtagtgtcttagtccatttgtgatgttatgacaaaatacctgagactcagtaatgtataaacaacagaaattcatttgtcacatttctagaagctggaagtccaagcagtttcagtgtctggtgagggcctggtctctgtttccaagatggcatcttgttgcagtgccctccagagagcaccaacaccgtgtcctcatatgtcagaagagatggaagggaatgaacctactctttcaagtttttgtaaaagggccctaatcccattcatgaggttctacccttatgactaactcacctcctaaaggtcccatttcttaatatcatcacattggtagttaactttcaacctatgaattttggggaatattcagaccacagcaggtagcctgcaaataaatagaataaaacagggttcgaagccgtgtgccaggcagaagaggccttatattgtagtaatgaagaatatggctgctggaccagactttctggatttaattcctgtctctagtagttccctgctatatgaccttggataattactctgtgcctcagtttccccttctgtgaaatagagatgattactgtaactgccttattatatatattaactgagttaatatacatagtttacttggaacaaaatttgtcacctagtaagcattcagtaaatattagttgtttttattagtcataaaattgcttattagccaaaacgcctcctccctgtgtcttagccagtactcatgttgttgaatttattgcaactcaaaatgtttcttggacatcgcaggtgctggaagaagcaaagccattttactgagagataatgtgcctctgatgttcatgctcattcctagagctcagacaaagtggctggcttccaacagagtaaggcagtgagagcctttgtttggttcaagcacaatggggccaatttaagtgtgcattatggaggcgtcttgacagttaccttcctatttcttgcaggatctgggcacaaggccaccaagataccacccccgcctccatggttcccaaagttactgttctgtaaattgcctattgttttcttgagtaaaagagattttgaaaaattagtattctgtaagcctatgcttgttcagtgtgacaaactccagggcagagagggaccctagatcacaagactccattctctcagttgaattttctgctttatacttaccatttttttccccctcaggccaggaaccatcactctgcaggccctttcagaagctaacagaaggctatggatggaagccatggatgggaaa

SEQ ID NO: 578 - DNA, 101 bp, Homo sapiens
aggctagagtgcagtgatgcaatcttggctcactgcaacctccgcctcccgggttcaagccattctcctgcctcagcctcccaagtagctgggattacagg

SEQ ID NO: 579 - DNA, 296 bp, Homo sapiens
gaacatatactcagtgaaatcacattatgagacaagagcggaagactttgttcttcatttcacattttctaaatgagctactttgcaaactgatcactagaaccatatacattaacaggatttcttgacaggaatttattcaaattctagtaagaagcaaaagggaggtatcgtgcacatttaactggttgtctactgttgagttcaaacataaccatggtcaaattattcagatgttagaaattcagcaagcttcttggtacctaagattaagaaatcaagcatcagcagaaatt

SEQ ID NO: 580 - DNA, 296 bp, Homo sapiens; identical to SEQ ID NO: 579

SEQ ID NO: 581 - DNA, 367 bp, Homo sapiens
gggattagaacccagatccccagcccaagttcaaacttgtcccctctccaggttacaactccaaaaaatggggctgtgacccagaaaactctgtgccagcaatctctgtctgtccccttcttcactctcacctagtttccacggggctcaggtgtctcctgttggccaacaggctggcctggcactcagccacctaggaccccatgtatcctggcattctaggcctggggtgatgcagacagatttcctcagcctccgcttcttctgccttgaaacactcagtccctcctgtgatccccgggacctggcttgggctgcgtgtgtgcgtgcctgtgtgtgtactcacacatgggcctggtagggaggc

SEQ ID NO: 582 - DNA, 434 bp, Homo sapiens
tttaaaactagtctaggaaacactttaatttctgtgagcaaaactgtatcttatctctgccttagttaaagatacaaattgtactttttaatatttatttgttaaattctctattaccaaggtgtatcggagatctacatgaatctctcaataaataattggtacattttatttatatgcataaaaattaggagtctcctccatccccagcatcatattccatacccacaaaacaatggtgaataagtcataatccccatttaacaattttctctatgtattgattcctgctatgtgcatgatactgaggggagcacttcatagaagacaataaggcttttgagcaccttctgtcttctgggtccagttgttatttcatttcacattattccataataacctgcaagaaggttgttattattatattatgtgtg

SEQ ID NO: 583 - DNA, 434 bp, Homo sapiens; identical to SEQ ID NO: 582

SEQ ID NO: 584 - DNA, 2395 bp, Homo sapiens
tctcagcctatttagaagtatcccatagtttaaaaatccaggaatctctgaattcctggctaactcctgagtaaaatcaacctatctaccaggaaaagcactagaaggcaccgtgccccttcatgggcgagtgacttgagggaatacgtgggtaaaagggaaggtgccataagttaacttctttggccagcactccagactgagcatcgagcctcctttattcccaccttctcttccaggcgcacgccgacactgggcggaagggaagaaaccagtggggatactgttcttttgcgggggcagcatgagcagactcaggtgggctctctgagactatcgcgttttgagtttccaggctgtggtactccctatccttccctacctcagaattctaagcataggccataattatgcaactgaattgaaaaatagaaacgtatagacaacagccagcactggatagtttttttaatggcttatcacaaaggttgagaatccctggttgagactgattaaatagagaatttacaatcttacataattttaaaccctttcatgcctaggaagaaaatgctggccttgagatagatagctcttcagaggatccagattaaactaaggtatgtaaaaaattagttttcgaagtcagctgcagtcatatgccacgttaggacgttttggccaacaaaggaccacatctgtgacagtgggcccataagattctaatactatatttttaccgtcctttttctatgtttagacatgcagatagcatggtgacagttgcctgcagtattcagtaccgtgctgtacagatgtgtagctaggagcagtaggttatggcacacagcctaggtgtgtagtgggtgccaccatctaggtctgtttaagtgtgctctgtgatgctcccacgacaaaatcgtccaacagcgcatttctcagaatgtacccctgtcgtcaactgatgcatggctgtaattttaagccagctgttcaaaaaagttctcaccaattagagaatttatattctcaccactttaacaaacggagttaagtaagaaacctctaaaatggttgctagaaattaaatattgtcaccgacctggtcaaaaccttttaagtaaaatgattagccaatcacagccttggcttacactggcatcagagtctggtgtgtgtcgcacacacgtgctgtaggtggaatgtttcatgacgaggactttctggaactcagaagccctttttgagtggggcccgggtagctgtaggatgggcagatctgaattcccagtacagtgtggcattttgaaaaagaaagaatgtataagaataaaagggtcagtcaagaagtaggagcaattattacccaactattcgaaggatgaccctttaaaaatcaataaaaacctatctggagtgaaagaccaacttaaatgagcaatagcatgaattacgtaatataaagacaagcgttcctgcttcaaagcacacgaaatattctgagtctgcctgcggagcttcagctgcagtcatctttttaccaagattgcacgtaagtccattttcttaggttaaatgctttttgtagtgttatttacactagtggtatgtgctaggaaccctttcttcgtttttctgagatttgacagaacatggaataacatatcaaactgaattcttagaacgtgagtaaatgaaactttccttttagaagcaatgtagaattacatgctccatattattcaaattaagaagcttttgaaataataccaccttgattatccatgatcattttctaattttaacattttgtacacatttacctcgttttctttcaaggcaacaggcgctgtagatcttagtaccctgcccatagacccaagcacttttctcatttcttctgacagttcgagtcacttctcacagttgacttcctcaccaaataataagggggtgaagaagactcggcctacctactactcagtaatcctgctgtccagtcgactggagaagagagatttgttcacctctactagttttatttgttcttagtagttgtagaatttaaattggttttaatgaaatgttccttttatgaaattttaaataaaagccatttagtgtatatttagtatagcaagaagcatgtgaataagctccatataacctgacattgcgcatcttacagcatcctcttggtcagatgtctaataaaaagattgttattttcaaatttatcatagttcctgcaacttgcactttttaaagctgtgtttgtgagaatttatagactgcatatcgctatacttgatggaaattaaactatttttattttgaaagaagttaatttatattttaagttctgtatgtttttctccttttacctgagttcttt

SEQ ID NO: 585 - DNA, 2395 bp, Homo sapiens; identical to SEQ ID NO: 584

SEQ ID NO: 586 - DNA, 1776 bp, Homo sapiens
tacattttgctgacagataactaaccgatgatgaggccgaggtaaaagagacatctgcagtgtgacagaagggagcatgagaagcatggctcaccagccagcctctgtggtctttgtaattagaagcttcagaactcactaatactactgtacctttcattggcgcattaccccataaaactttttgagacgaggtgagatctgagtataaagataggtcagaagtattttaaagggcttaatgtgccaaaaagaaaaaaagctagagaccctttttgcaaacatttggtgaccacacatttgagggaagacgtggcgttaggtgaagcagaagcaaaccctgctcttaggggctcacctaggtgagtgcacagcctgtgacgctacagggagaggctgagtaaaccgagatccagcgttctgtatggcaggggtattgcttatcacagaggttctgaagagtaggaagtacataatgaagagggctttaaaaattgccaacaaagtgagtcaccagggctggcagtagtgtgacggggctgtcctgagctgttaggagagtagatgcggggagggctggtgacctccgtgggtttatatgtcggaaactcttctctccaaatcccaggcctggcttccagcaccatccagctgtgcccaagaagccaccctggtctgttctccaactcttttaaatggtgcccaacttttctaagtgagcttagcaatgagaagaaaaaaaaacatgaattctttttctggaaaatcagggagacatgggtaataataggtactaataaatatttatagatgagtgaatgaggaaataattacatcaaaaaggtcagtgacaattgataaatgacaaggaaatatttaattaggtaaaactaaatcattgctctctatactaggatagactttatctacttcatctgttcctaagtcagcatgttagttctggggaaggatcataagaaaggaaatactttttaaaaaaaaatttggaaacatgtaacaaagcaagggtaaaatatatatatatatctatataagtgctgtgactgtaaaagtgtactttccattaattattagccgagttaagagaatggtcacattgaagtactgtgtggactagaaatgtaccctgtcatcatgcaatgaaatattgttatcgttttaacatagctcatttatgtagaatgaattctggtggtttaccccaagtcacagttaggacggtagatggtgagatcgcagatgcgctattatctagattcagtgttacattttcgatgtttatcactcagtgggtttttattaatatgctgattaagttatttactgggccagtcattgtgctaaatagttgctcttttgtgtttcattgccttgatgtttgagtgtaatctagcattttaatacagtgtttattttgcatgatctttaacaaatgttttaagcaattttaaaaaggcaggatgttattgacattatacactgaagtcttaacattttaacatttatagtgcttatttgcaaaattgtataattaggaattatttcagagacaatgttttctttttcaggtgagtagttgccgcgtaatatcattggagtacattctttatactgtttgtgaaattaatactagcatattaagtgtacaaatagatttagaaaacaataaaaaattgcatgctattctgactcatgaatttttattcactatgatgattcacattttgattaaaaataaaagtagtttgtgtgttt

SEQ ID NO: 587 - DNA, 8143 bp, Homo sapiens
ggctcgagcccagccccaggcccagtggtattactgaattcactgaatgtggatgcagtatgtgagaagctgaaacaaatagaagggctggaccagagtatgctgcctcagtattgtaccacgatcaaaaaggtgaggcagccacttacacacggaccagagacagcgctgggggcggaagacaggactgtgtgggtcgtgtaaactttatgtatagcttcccaaacatgcattccctgttaaaatgggaaagctctaaatggaaaacataattcttactagtttgtattctaaaattgccctgttttctcttattttataaatggataaaataaaataaagtagctgtcttaccatgttcttttttaaatgacgtaatacaagtaaagaatgccttgatgagaaagagaaagctctgagggattcccattgggataaacagaactcatctttccagtgtggaaccgaaaacctttgtgttacatttttttctaattgtaatatttgttagtgtgatttagtgattatcaaagtaagccacacttgcctcattttctccaaattctcattttcatgtcatgtaggacttaggatcatgtcacatttgatgaaaccacataggtttgggtttgcaaggttaatgcatttgcatagtttttttttcttctaagatcctattgcaattctagcagctatcaggaagttggctagagatgcctgagatttgggggaaggttttaacgaagtctttatagtaggtatttcactaaggtatactttttatatcagagtactgtgtaataaagtagaacgttaataaccagcctctaatatttatatacttgaaagaatgacatctgagagaagttttttaaagaattatgagcatatgtagacaccattttactcatctcagccaattttagaaaggtttcagataatgtcagtttccttacagagctggctcgtgctagtccctgtttgcatgagtcaaacaccggcttttccatggataagccccactttctccttcaggcagctggttggtgtcaggaaagagcggggtctcccacacgagtcctttgtgatgattttgttcccatcggggtagtggttttctccccactcagctctttgctcctagaccccggctttctgaagcccctcagagccgctggcctcctccgtgcttagggctccgcggcattgttgcagcaggacctctgtcacagacttgctgtgtatactgttttcttcaggattaacttggaaactgaacattctattgattataaacatagctatttcataaatttgccccagttaataaagtcaggttttacattttataaaagcagtaagctacctattattaataaagaaaatgctgttgtttcatttaggggaaactagaattacagggaaccaaaagtaataacttccttttttatgattttttttttctttgagatggagtcctgctatgtcacccaggctggagtgcagtggcgtggccatggctcactgcaacctcccgcctcctgggtgcaagcgatcctcctgcctcagcctcccaagtagctgggactacaggcatgtgccaccactcccagctaatttttgtagttttaatagagatggaatttcaccatgttggccaggctggtctcgaactcctgactttaggtgatccacccacctcagcctcccaaagttctgggattacatgcgtgagccaccgcgccgggccttgtgaatttaatagactggaaaattagtgggtgggcattcttcatatctgtatctaatataacggataaacaagtttgccaggcctacttcatttagaacgttgttagtgaccaacacgcttatgagaacagatgtctttgtcccctcccagcagcttgtgttcatgttcatattttctaagattagaaaacaaaaactaacagttttgttgttgctcatgacagcataggtagttttggaaataggagggttagttcttcggttggtcccagaaaatgcctaagacatttgggaaaatatgaagtggctgatgttgttcaaattcagcttgtttattgtattattatatgggatgataaccttttttttggtcagcctttctggtctctagagacttatttaaaactaaatataagcatacttggcaatcactagtaattcagaatatttcacattctgtctttatacccataattgttttaatttttactcaggcaaacataaatggccgtgtgttagctcagtgtaacattgatgagctgaagaaagagatgaatatgaattttggagactggcaccttttcagaagcacagtaagatatttgtaacattgtgatgtttacaacattattttatgataacattcaaaattatttataacattgtagaaaaccagtatcaataagtactggcctaaactggtatttttttcatatttttttaaatttaaaaactgcttcttacacttatgtgcaatcctgtgttgtggaaaatacacacagcagcacttggcagcctttgcctttttgggcatttcactcagagatttggggaagaggccgcctgccggttcttcatgctttcacctgccttaactctcatcaggctcctcaaagccttcgaggccttgaccttcagcattcatccttatagggcttgcattgcccaggtttagcaagaatcctgttaagtcagtttacatgtgtgatcaccctcagtatttgatcaaacgcctcactaacccccccacccccaggtgatgtcggctcaccctggccatcggcgtaccaagagtcccccactcctgctgcctccccttagtaatgttccatccacgacccccaccctgccccttggtggtagatccccactcattcgtgcttattccgagttggactcccttctgtagtgagactgcttacccctgttgccatagttctgaataaaatctggacctaccgccctactcctggccagctctggttttgacacaagccagctgcatttttctttgtcctcaagttaagttttaaacagaagtaataatttaatggacaaattgcagtgtagtatatgtatggtggtttctaccattgcttcctttagtattaatgaacatgaaagataagctgatgtataaaacaaattcactagaaattcacttaccagaagtatgctttctcattgctgttgcaatagctttataatgtttggtatttctaaatatttctaaagcttctaaaatatgatttgttagtgtaaatatttatgtttttcttctgttaaggtactagaaatgagaaacgcagaaagccacgtggtccctgaagacccacgtttcctcagtgagagcagcagtggcccagccccgcacggtgagcctgctcgccgcgcttcccacaacgagctgcctcacaccgagctctccagccagacgccctacacactcaacttcagcttcgaagagctgaacacgcttggcctggatgaaggtgcccctcgtcacagtaatctaagttggcaggtatttattgaatggcatttttcatattattgaagaataagcacaccgttcagttcactgagattatatgggcatttagacagtcattcagaaaatgcttactgaatacctaagtgaacaggagacaagatggagggctccctgtactcaaggagctgcatccatgtggagaggggcagtcagtgaaacaaacaaaaaagtagctcatgtagacattgatgagagctgagatatccatcagggtcacagcatgcagagtcaatagggattaggccacttgagctagggtggtcagcaaattcagcctttctcaggcgatcttcctgttgcattcagtaactgttggttgaagtacatcttcattggaacactggccacatagtgtccctttgagcaccatcctttggttttccaggacgcctgcacacccttcacggatattggtttcttctggtctggcattagatgtaggcgcgttcttcctttggagattcttagaagaaggaggccaggtgaggggtaggggtaggggcagggacagagcaaagtgagagatgcaggaggagtagcgggagtgaggagagcgcaggaggaaaagcagagcagggtgtggagaacaacgggggaggaggcacagcgggcggcagcgagtaacactgagtgggcagggcagggcagcggtgaggaggagcagcgccttggggaaggaagaaaatgtcctatttccttgagaaggtccccaacaaattcactttgctccttcttttttgttttagcctttgctcttgacccttcttaaactttcttgattcttctccttctttttcctcatctgtactttttgctccttgtttcttagctattctgggatctgaagcaaattctaattctaaaacttaatattggaaataaacttgtaaaactactttatttttctgtttactaaggcccaactattggcctcattgcattttatattttatcaatgaagttgactttggccttaaataaaagctaaacgtttgaagttataaaaacaagtgctgtggccgagcatgtgggacatgcccatagtcccagctgctcaggaggctgaggcgggaggattgcttgagtccagtagtttgaatctagcctgggcaacacagcaagatcctgtctcttaaaaatgaaataaaaaccagaaacaagtgctaagattatttgttaatacagtgtttaatcatacttttaaatattaacaataaactgattttattaaaatttatagaaagctttctagtaacagcattataaggtcacagcttttgttaatctgtgttatgtagaattcttttaaaagaatttgatgttttgatgactttttaaatggttagtgtacatatatatttcctaagctgatgtttatgccttttttcttcttatttgaatttttaaattattttttttctgtcttcacagtcacaaactcgcagaaccccaagtctttcgagtctcaattcccaggattccagtattgaaatttcaaagcttactgataaggtgcaggccgagtatagagatgcctatagagaatacattgctcagatgtcccagttagaagggggccccgggtctacaaccattagtggcagatcttctccacatagcacatattacatgggtcagagttcatcagggggctctattcattcaaacctagagcaagaaaaggggaaggatagtgaaccaaagcccgatgatgggaggaagtcctttctaatgaagaggggagatgttatcgattattcatcatcaggggtttccaccaacgatgcttcccccctggatcctatcactgaagaagatgaaaaatcagatcagtcaggcagtaagcttctcccaggcaagaaatcttccgaaaggtcaagcctcttccagacagatttgaagcttaagggaagtgggctgcgctatcaaaaactcccaagtgacgaggatgaatctggcacagaagaatcagataacactccactgctcaaagatgacaaagacagaaaagccgaagggaaagtagagagagtgccgaagtctccagaacacagtgctgagccgatcagaaccttcattaaagccaaagagtatttatcggatgcgctccttgacaaaaaggattcatcggattcaggagtgagatccagtgaaagttctcccaatcactctctgcacaatgaagtggcggatgactcccagcttgaaaaggcaaatctcatagagctggaagatgacagtcacagcggaaagcggggaatcccacatagcctgagtggcctgcaagatccaattatagctcggatgtccatttgttcagaagacaagaaaagcccttccgaatgcagcttgatagccagcagccctgaagaaaactggcctgcatgccagaaagcctacaacctgaaccgaactcccagcaccgtgactctgaacaacaatagtgctccagccaacagagccaatcaaaatttcgatgagatggagggaattagggagacttctcaagtcattttgaggcctagttccagtcccaacccaaccactattcagaatgagaatctaaaaagcatgacacataagcgaagccaacgttcaagttacacaaggctctccaaagatcctccggagctccatgcagcagcctcttctgagagcacaggctttggagaagaaagagaaagcattctttgagaaaaacaagcaaaggagaagagtgttactgtacctttatgacagaattgtcctggattttgactccatccacgcccatcacctttctacattttgctgacagataactaaccgatgatgaggccgaggtaaaagagacatctgcagtgtgacagaagggagcatgagaagcatggctcaccagccagcctctgtggtctttgtaattagaagcttcagaactcactaatactactgtacctttcattggcgcattaccccataaaactttttgagacgaggtgagatctgagtataaagataggtcagaagtattttaaagggcttaatgtgccaaaaagaaaaaaagctagagaccctttttgcaaacatttggtgaccacacatttgagggaagacgtggcgttaggtgaagcagaagcaaaccctgctcttaggggctcacctaggtgagtgcacagcctgtgacgctacagggagaggctgagtaaaccgagatccagcgttctgtatggcaggggtattgcttatcacagaggttctgaagagtaggaagtacataatgaagagggctttaaaaattgccaacaaagtgagtcaccagggctggcagtagtgtgacggggctgtcctgagctgttaggagagtagatgcggggagggctggtgacctccgtgggtttatatgtcggaaactcttctctccaaatcccaggcctggcttccagcaccatccagctgtgcccaagaagccaccctggtctgttctccaactcttttaaatggtgcccaacttttctaagtgagcttagcaatgagaagaaaaaaaaacatgaattctttttctggaaaatcagggagacatgggtaataataggtactaataaatatttatagatgagtgaatgaggaaataattacatcaaaaaggtcagtgacaattgataaatgacaaggaaatatttaattaggtaaaactaaatcattgctctctatactaggatagactttatctacttcatctgttcctaagtcagcatgttagttctggggaaggatcataagaaaggaaatactttttaaaaaaaaatttggaaacatgtaacaaagcaagggtaaaatatatatatatatctatataagtgctgtgactgtaaaagtgtactttccattaattattagccgagttaagagaatggtcacattgaagtactgtgtggactagaaatgtaccctgtcatcatgcaatgaaatattgttatcgttttaacatagctcatttatgtagaatgaattctggtggtttaccccaagtcacagttaggacggtagatggtgagatcgcagatgcgctattatctagattcagtgttacattttcgatgtttatcactcagtgggtttttattaatatgctgattaagttatttactgggccagtcattgtgctaaatagttgctcttttgtgtttcattgccttgatgtttgagtgtaatctagcattttaatacagtgtttattttgcatgatctttaacaaatgttttaagcaattttaaaaaggcaggatgttattgacattatacactgaagtcttaacattttaacatttatagtgcttatttgcaaaattgtataattaggaattatttcagagacaatgttttctttttcaggtgagtagttgccgcgtaatatcattggagtacattctttatactgtttgtgaaattaatactagcatattaagtgtacaaatagatttagaaaacaataaaaaattgcatgctattctgactcatgaatttttattcactatgatgattcacattttgattaaaaataaaagtagtttgtgtgttt

SEQ ID NO: 588 - DNA, 8041 bp, Homo sapiens
ggtatgaattttatcataaattaagtaactctacattccattaactctctttttaaatagttcaaatgggggggacagtaattttttttaatacttatgaagtgttacctcaaaataatattgcccatggatatcaaatcagtctgaatgaacataactgaaaaatattcagaatgcttgaaatgacttagaagtaatctttaagagctaaccctaggggcccagtcctcctttcatagaggtgagctccttagctgaaatacatctctaaaagaccttctgtgaaaagtgagaggtgcaaaagttcctgaatgaccaaataccctgctgccaaaacgaaaagcaatttcatttaaaagtatattccgtttatcttctgcgcagcacttgaattttattgagatagagatattctgtacaccaaacccaatttaattcccataaataaagcagagtgggtgaacatgatcctctattttcttttgttgcagagaaacgctgattcctgataactggtggtgtttcatttgtttttgtttgatttttcacgttagaggagcagagttttcagacacttaggcctacaagacttaacccctgttgggcaaggggatttaggggaggaagcacatcagtaatatcagcactcaactataatgtgtccaagtgaaaatggctcaaagtaaaagagatccttagatgcataataaaaaagtcatgccctttcttagcaagcaggataaaaacagactgataaaataatttccagtaccaacatcttttccatctgtttttctatcatttctagaactaagtgccaaaaacgctttttttaagaaaaaagttttgctcaaagttgccttctctctcttttctatttatttctctgctttttaaaattacattttatgttctaaaatcactgatctgagcttattactttcttattgaaaaactctcagaggtttccaaaagctaaagagcacttaaaagttcaaactcctagcacaatattcgagactctccatgtgagacttaaacttgcattcccaatacacattcccaacagcgtcattcagacattattaggaaagccaatcagaaacttttacaatttctgttccatgctctttcttttccttattccaaaccttttgtcaaattgtttcctcccataacatctgtttaatttctattcatccttcaaacttagtcactttctctaagatgcctacctagctagatccccatataaggttttgatatcactcttctcacagcactttcctatggcactcataatctaagttggattatatttttgtgtgtatttcttacacatcagggcaaatatgtttggggataaaggtgtttagaaagaataacccaactattttcaccattgcagccctagaattttgccttaaaatacaaagtcagggcacagtatgtttgctgtgttagagaattaaaataatacttgcctcttttctttttcttcctttcctttttacaaaaatatcctcatttcttctcttgtctttttgtctttttttctccacaattctacaaactttcttcttttccattttcctcttttactgtcttcttatttcttcttcattttttattccttcacttctttgtctgccccttattttcttcttcaatatcataggttttgcacaaattttttcaacatctattcacctattcttttatattgctagtgtaaaatttttaatatgttctgaagcaaatttcatctgtgcataattattcaataatttactcattcatttcatttaattttattaaatatttgttgtttattcatgagtaccaagcactcttctgagcactagagatctgaattgagtaagactgacagaatcacttctcatggaagttaagttattgtagagacagagaaaaatcccacaaagaatcaaaaaatactgtagaatggtaggtggtgaatataaaaaagagaaacttaaaatgacaaattcttcatctgaataatgacagggttataactattagatttacccttcagccataaacaaatataacactcaaaaaatacataagcagcaactctttttagacatctaacaacagactccacaacactgctatcctggaaaagaaagaactactggaggtaagcaacacatttaccctggctttttgattaggaacgcagtgaaatagaacccaaagagaaattgatggtgtctaaggtagacattattagcattgtggctgggatttatgaagcaggttagtagagaggaggtagctgtttagagatgaagcttcagaaatcttttctaaggtcaccttaagccactggcttaatattaggcatttatagggcaagatttgctgaaaccctgaagagaactacttgagggttgtgagccaaatagagatattagaggctgcatttccatctgagctttgaagagagcagtgattctcccagcacgcagctggagatctgagaaagggcagactgcctcctcaagtgggtccctgacccctgacccccgagcagcctaactgggaggcaccccccagtaggggcagactgacacctcacacggccgggtactcctctgagacaaaaattccagaggaacgatcagacagcagcatttgcggttcacaaaaatccactgttctgcagccaccgctgctggtacccaggcaaacaaggtctggagtggacctctagcaaactccaacagacctgcagctgagggtcctgtctgttagaaggaaaactaacaaacagaaaggacatccaccccaaaaacccatctgtacatcaccatcatcaaagaccaaaagtagataaaaccgcaaagatggggaaaaaacacagcagaaaaactggaaactctaaaaagcagagcacctctcctcctccaaaggaacgcagctcctcaccagcaacggaacacagctggacagagaatgactttgacgagttgagagaagaaggcttcagacgatcaaactactctgagctacaggaggaaattcaaaccaaaggcaaagaagttgaaaactttgaaaatgattttgacgaatgtataactagaataactaatacagagaagtacgtaaaggagctgatggagctgaaagccaaggctcgagaactacgtgaagaatgcagaagcctcaggagctgatgcgatcaactggaagaaagggtatcagtgatggaagatgaagtgaatgaaatgaagcgagaagggaagtttagagaaaacagaataaaaagaaacgaacaaagcctccaagaaatatgagactatgtgaaaagaccaaatctacgtctgattggtgtacctgaaagtgatggggagaatggaaccaagttggaaaacactctgcaggatattatccaggagaacttccccaatctagcaaggcaggccaacgttcagatgcaggaaatacaagaacgccacaaagatactcctcaaaaagagcaactcaagacacataattgtcagattcacaaaagttgaaatgaaggaaaaaatgttaagggaggccagagatgaaggtcgggttacccacaaagggaagcccatcagactaacagcggatctctcggcagaaactctacaagccagaagagagtgggggccaatattcaacattcttaaagaaaggaattttcaaaccagaatttcatatccagccaaactaagcttcataagtgaaggagaaataaaatactttacagacaagcaaatgctgagagattttgtcaccaccaggcctgccctaaaagagctcccgaaggaagcactaaacatggaaaggaacaaccggtggcagccactgcaaaatcatgccaaattgtaaagaccatcgaggctaggaagaaacggcatcaactaacgagcaaaatagccagctaacatcataatgacaggatcaaattcacacataacaatattaactttaaatgtaaatggactaaatgctccaattaaaagacacagactggcaaattggataaagagtcaagacccatcagtgtgctgtattcaggaaacccatctcacgtgcagagacacacataggctcaaaataaaaggatggaggaaaatctaccaagcaaatggaaaacaaaaaaaggcaggggttgcaatcccagtctctgataaaacagactttaaaccaacaaacatcaaaagagacaaagaaggccattacataatggtaaagggatcaattcaacaagaagagctaactatcctaagtatatatgcacccaatacaggagcacccagattcataaagcaagtcctgagtgacctagaaagagacttagactgccacacaataataatgggagactttaacaccccactgtcaacattagacagatcaacgagacagaaagttaacaaggatacccaggaattgaacccagctctgcaccaagcggacctaatagatatctacagaactctccaacccaaatcaacagaatatacatttttttcagcaccacaccacacctattccaaaattgaccacatagttggaagtaaagctctcttcagcaaatgtaaaagatcagaaattataacaaactgtctctcagaccacagtgcaatcaaactagaactcaggattaagaaactcactcaaaaccactcaactacgtggaaaatgaacaacctgctcctgaatgactactgggtacataatgaaatgaaggcagaaataaagatgttctttgaaaccaacgaaaacaaagacacaacacaccagaatctctgggacacattcaaagcagtgtgtagagggaaatttatagcactaaatgcccacaagagaaagcaggaaagatttaaaattgacaccctaacatcacaattaaaagacacagaaaagcaagagcaaacacattcaaaagctagcagaaggcaagaaataactaagatcagagcagaactgaaggaaatagagacacaaaaaacccttcaaaaaattaatgaatccacgagctggttttatgaaaggatcaacaaaattgatagaccactagcaagactaataaagaagaaaagagagaagaatcaaatagatgcaataaaaaatgataaaggggatatcaccaccaatcccacagaaatacaaactaccatcagagaatactacaaacacctctacacaaataaactagaaaatctagaagaaatggataaattcctggacacatacaccctcccaagactaaaccaggaagaagttgactctctgaatacacaggatctgaatcacaggatctgaatcacaggatctgaaattgtggcaataatcaataacttaccaaccaaaaagagtccaggaccagatggattcacagccgaattctaccagaggtacaaggaggagctggtaccattccttctgaaactattccaatcaatagaaaaagagggaatcctccctaactcattttatgaggccagcatcatcctgataccaaagctaggcagagacaaaaccaaaaaagagaattttagaccaatatccttgatgaacactgatgcaaaaatactcagtaaaatactggcaaaccaaatccagcagcacatcaaaaggcttatccaccatgatcaagtgggcttcatccctgtgatgcaaggctggttcaatatacacaaatcaataaatgtaatccagcatataaacagaacaaaagacaaaaaccacatgattatctcaatagacgcagaaaaggcctttgacaaaattcaacaatgcttcatgctaaaaactctcaataaattaggtattgatggaacgtatctcagaataataagagctatgtatgacaaacccacagccaatatcatactgaatgggcaaaaactggaagcattccctttgaaaactggcacaagacagggatgccctctctcaccactcctattcaacatagtgttggaagttctggccagggcaattaggcaggagaaggaaataaagggtattcaattaggaaaagaggaagtcaaattgtccctgtttgcagacgacatgattgtatatctagaaagccccaatgtctcagcccaaaatctccttaagctgataagcaacttcagcaaagtctcaggatacaaaatcaatgtacaaaaatcacaagcattcttatacaccaataacagacaaacagagagccaaatcatgagtgaactcccattcacaattgcttcaaagagaataaaatacctaggaatccaacttacaagggatgtgaaggacctcttcaaggagaactacaaaccactgctcaatgaaataaaagaggatacaaagaaatggaagaacattccatgctcatgggtaggaagaatcaatattgtgaaaatggccatactgcccaaggtaatttatagattcaatgccatccccatcaagctaccaatgactttctacacagaattggaaaaaactactttaaagttcatatggaaccaaaaaagagcccacaccaccaagtcaatcctaagccaaaagaacaaagctggaggcatcatgctacctgatttcaaactatactacaaggctacagtaaccaaaacagcatggtactggtaccaaaacagatatatagatcaatggaacagaacagagccctcagaaataacaccgcatatctacaactatctgatctttgacaaacctgagagaaacaagcaatggggaaaggattccctagttaataaatggtgctgggaaaactggcttgccataggtagaaagctgaaactggatcccttccttacaccttatagaaaaattaattcaagatggattaaagacttaaacgttcgacctaaaaccataaaaaccctagaagaaaacctaggcattaccattcaggacataggcatgggcaaggacttcatgtctaaaacaccaaaagcaatggcaacaaaagccaaaattgacaaatgggatctaattaaactaaagagcttctgcacagtaaaagaaactaccatcagagtgaacaggcaacctacaaaatgggagaaaattttcgcaacctactcatctgacaaagggctaatatccagaatctacaatgaactcaaacaaatttacaagaaaaaaacaaacaaccgcatcaaaaagtgggcgaaggatatgaacagacacttctcaaaagaagacatttatgcagccaaaaaagacacgaaaaaatgctcaccatcactggccatcagagaaatgcaaatcaaaaccacaatgagataccatctcacaccagttagaatggcaatcattaaaaagtcaggaaacaacaggtgctggagaggatgtggagaaacaggaacacttttacagtgttggtgggactgtaaactagttcaacccttgtggaagtcagtgtggtgattcctcagggatctagaaatagaaataccatttgacccagccatcccattactgggtatatacccaaaggactataaatcatgctgctataaagacacatgcacaggtatgtttattgtggcactattcacaatagcaaagacttggaaccaacccaaatgtccaacaatgatagactggattaagaaaatgtggcacatatacaccatggaatactatgcagccataaaaaatgatgagttcacgtcctttgtagggacatggatgaaactggaaatcatcattctcagtaaactatcgcaagaacaaaaaccaaacaccgcatattctcactcataggtgggaactgaacaatgagaacacatggacacaggaaggggaacatcacactctggggactgttgcagggtggggccagggggagggatagctttaggagatatacctaatgctaaatgacgagttaatgggtgcagcacaccagcatggcacatgtatacatatgaaactaacctgcacattgtgcacatgtaccctaaaacttaaagtataataataataaaataaaataaaaaataaaaataaaaaa

SEQ ID NO: 589 - DNA, 21577 bp, Homo sapiens
ggtatgaattttatcataaattaagtaactctacattccattaactctctttttaaatagttcaaatgggggggacagtaattttttttaatacttatgaagtgttacctcaaaataatattgcccatggatatcaaatcagtctgaatgaacataactgaaaaatattcagaatgcttgaaatgacttagaagtaatctttaagagctaaccctaggggcccagtcctcctttcatagaggtgagctccttagctgaaatacatctctaaaagaccttctgtgaaaagtgagaggtgcaaaagttcctgaatgaccaaataccctgctgccaaaacgaaaagcaatttcatttaaaagtatattccgtttatcttctgcgcagcacttgaattttattgagatagagatattctgtacaccaaacccaatttaattcccataaataaagcagagtgggtgaacatgatcctctattttcttttgttgcagagaaacgctgattcctgataactggtggtgtttcatttgtttttgtttgatttttcacgttagaggagcagagttttcagacacttaggcctacaagaacttaacccctgttgggcaaggggatttaggggaggaagcacatcagtaatatcagcactcaactataatgtgtccaagtgaaaatggctcaaagtaaaagagatccttagatgcataataaaaaagtcatgccctttcttagcaagcaggataaaaacagactgataaaataatttccagtaccaacatcttttccatctgtttttctatcatttctagaactaagtgccaaaaacgctttttttaagaaaaaagttttgctcaaagttgccttctctctcttttctatttatttctctgctttttaaaattacattttatgttctaaaatcactgatctgagcttattactttcttattgaaaaactctcagaggtttccaaaagctaaagagcacttaaaagttcaaactcctagcacaatattcgagactctccatgtgagacttaaacttgcattcccaatacacattcccaacagcgtcattcagacattattaggaaagccaatcagaaacttttacaatttctgttccatgctctttcttttccttattccaaaccttttgtcaaattgtttcctcccataacatctgtttaatttctattcatccttcaaacttagtcactttctctaagatgcctacctagctagatccccatataaggttttgatatcactcttctcacagcactttcctatggcactcataatctaagttggattatatttttgtgtgtatttcttacacatcagggcaaatatgtttggggataaaggtgtttagaaagaataacccaactattttcaccattgcagccctagaattttgccttaaaatacaaagtcagggcacagtatgtttgctgtgttagagaattaaaataatacttgcctcttttctttttcttcctttcctttttacaaaaatatcctcatttcttctcttgtctttttgtctttttttctccacaattctacaaactttcttcttttccattttcctcttttactgtcttcttatttcttcttcattttttattccttcacttctttgtctgccccttattttcttcttcaatatcataggttttgcacaaattttttcaacatctattcacctattcttttatattgctagtgtaaaatttttaatatgttctgaagcaaatttcatctgtgcataattattcaataatttactcattcatttcatttaattttattaaatatttgttgtttattcatgagtaccaagcactcttctgagcactagagatctgaattgagtaagactgacagaatcacttctcatggaagttaagttattgtagagacagagaaaaatcccacaaagaatcaaaaaatactgtagaatggtaggtggtgaatataaaaaagagaaacttaaaatgacaaattcttcatctgaataatgacagggttataactattagatttacccttcagccataaacaaatataacactcaaaaaatacataagcagcaactctttttagacatctaacaacagactccacaacactgctatcctggaaaagaaagaactactggaggtaagcaacacatttaccctggctttttgattaggaacgcagtgaaatagaacccaaagagaaattgatggtgtctaaggtagacattattagcattgtggctgggatttatgaagcaggttagtagagaggaggtagctgtttagagatgaagcttcagaaatcttttctaaggtcaccttaagccactggcttaatattaggcatttatagggcaagatttgctgaaaccctgaagagaactacttgagggttgtgagccaaatagagatattagaggctgcatttccatctgagctttgaagagagcagtgattctcccagcacgcagctggagatctgagaaagggcagactgcctcctcaagtgggtccctgacccctgacccccgagcagcctaactgggaggcaccccccagtaggggcagactgacacctcacacggccgggtactcctctgagacaaaaattccagaggaacgatcagacagcagcatttgcggttcacaaaaatccactgttctgcagccaccgctgctggtacccaggcaaacaaggtctggagtggacctctagcaaactccaacagacctgcagctgagggtcctgtctgttagaaggaaaactaacaaacagaaaggacatccaccccaaaaacccatctgtacatcaccatcatcaaagaccaaaagtagataaaaccgcaaagatggggaaaaaacacagcagaaaaactggaaactctaaaaagcagagcacctctcctcctccaaaggaacgcagctcctcaccagcaacggaacacagctggacagagaatgactttgacgagttgagagaagaaggcttcagacgatcaaactactctgagctacaggaggaaattcaaaccaaaggcaaagaagttgaaaactttgaaaatgattttgacgaatgtataactagaataactaatacagagaagtacgtaaaggagctgatggagctgaaagccaaggctcgagaactacgtgaagaatgcagaagcctcaggagctgatgcgatcaactggaagaaagggtatcagtgatggaagatgaagtgaatgaaatgaagcgagaagggaagtttagagaaaacagaataaaaagaaacgaacaaagcctccaagaaatatgagactatgtgaaaagaccaaatctacgtctgattggtgtacctgaaagtgatggggagaatggaaccaagttggaaaacactctgcaggatattatccaggagaacttccccaatctagcaaggcaggccaacgttcagatgcaggaaatacagaacgccacaaagatactcctcaaaaagagcaactcaagacacataattgtcagattcacaaaagttgaaatgaaggaaaaaatgttaagggaggccagagatgaaggtcgggttacccacaaagggaagcccatcagactaacagcggatctctcggcagaaactctacaagccagaagagagtgggggccaatattcaacattcttaaagaaaggaattttcaacccagaatttcatatccagccaaactaagcttcataagtgaaggagaaataaaatactttacagacaagcaaatgctgagagattttgtcaccaccaggcctgccctaaaagagctcccgaaggaagcactaaacatggaaaggaacaaccggtggcagccactgcaaaatcatgccaaattgtaaagaccatcgaggctaggaagaaacggcatcaactaacgagcaaaatagccagctaacatcataatgacaggatcaaattcacacataacaatattaactttaaatgtaaatggactaaatgctccaattaaaagacacagactggcaaattggataaagagtcaagacccatcagtgtgctgtattcaggaaacccatctcacgtgcagagacacacataggctcaaaataaaaggatggaggaaaatctaccaagcaaatggaaaacaaaaaaaggcaggggttgcaatcccagtctctgataaaacagactttaaaccaacaaacatcaaaagagacaaagaaggccattacataatggtaaagggatcaattcaacaagaagagctaactatcctaagtatatatgcacccaatacaggagcacccagattcataaagcaagtcctgagtgacctagaaagagacttagactgccacacaataataatgggagactttaacaccccactgtcaacattagacagatcaacgagacagaaagttaacaaggatacccaggaattgaacccagctctgcaccaagcggacctaatagatatctacagaactctccaacccaaatcaacagaatatacatttttttcagcaccacaccacacctattccaaaattgaccacatagttggaagtaaagctctcttcagcaaatgtaaaagatcagaaattataacaaactgtctctcagaccacagtgcaatcaaactagaactcaggattaagaaactcactcaaaaccactcaactacgtggaaaatgaacaacctgctcctgaatgactactgggtacataatgaaatgaaggcagaaataaagatgttctttgaaaccaacgaaaacaaagacacaacacaccagaatctctgggacacattcaaagcagtgtgtagagggaaatttatagcactaaatgcccacaagagaaagcaggaaagatttaaaattgacaccctaacatcacaattaaaagacacagaaaagcaagagcaaacacattcaaaagctagcagaaggcaagaaataactaagatcagagcagaactgaaggaaatagagacacaaaaaacccttcaaaaaattaatgaatccaggagctggttttatgaaaggatcaacaaaattgatagaccactagcaagactaataaagaagaaaagagagaagaatcaaatagatgcaataaaaaatgataaaggggatatcaccaccgatcccacagaaatacaaactaccatcagagaatactacaaacacctctacacaaataaactagaaaatctagaagaaatggataaattcctggacacatacaccctcccaagactaaaccaggaagaagttgactctctgaatacacaggatctgaatcacaggatctgaatcacaggatctgaaattgtggcaataatcaataacttaccaaccaaaaagagtccaggaccagatggattcacagccgaattctaccagaggtacaaggaggagctggtaccattccttctgaaactattccaatcaatagaaaaagagggaatcctccctaactcattttatgaggccagcatcatcctgataccaaagctaggcagagacaaaaccaaaaaagagaattttagaccaatatccttgatgaacactgatgcaaaaatactcagtaaaatactggcaaaccaaatccagcagcacatcaaaaggcttatccaccatgatcaagtgggcttcatccctgtgatgcaaggctggttcaatatacacaaatcaataaatgtaatccagcatataaacagaacaaaagacaaaaaccacatgattatctcaatagacgcagaaaaggcctttgacaaaattcaacaatgcttcatgctaaaaactctcaataaattaggtattgatggaacgtatctcagaataataagagctatgtatgacaaacccacagccaatatcatactgaatgggcaaaaactggaagcattccctttgaaaactggcacaagacagggatgccctctctcaccactcctattcaacatagtgttggaagttctggccagggcaattaggcaggagaaggaaataaagggtattcaattaggaaaagaggaagtcaaattgtccctgtttgcagacgacatgattgtatatctagaaagccccaatgtctcagcccaaaatctccttaagctgataagcaacttcagcaaagtctcaggatacaaaatcaatgtacaaaaatcacaagcattcttatacaccaataacagacaaacagagagccaaatcatgagtgaactcccattcacaattgcttcaaagagaataaaatacctaggactccaacttacaagggatgtgaaggacctcttcaaggagaactacaaaccactgctcaatgaaataaaagaggatacaaagaaatggaagaacattccatgctcatgggtaggaagaatcaatattgtgaaaatggccatactgcccaaggtaatttatagattcaatgccatccccatcaagctaccaatgactttctacacagaattggaaaaaactactttaaagttcatatggaaccaaaaaagagcccacaccaccaagtcaatcctaagccaaaagaacaaagctggaggcatcatgctacctgatttcaaactatactacaaggctacagtaaccaaaacagcatggtactggtaccaaaacagatatatagatcaatggaacagaacagagccctcagaaataacaccgcatatctacaactatctgatctttgacaaacctgagagaaacaagcaatggggaaaggattccctagttaataaatggtgctgggaaaactggcttgccataggtagaaagctgaaactggatcccttccttacaccttatagaaaaattaattcaagatggattaaagacttaaacgttcgacctaaaaccataaaaaccctagaagaaaacctaggcattaccattcaggacataggcatgggcaaggacttcatgtctaaaacaccaaaagcaatggcaacaaaagccaaaattgacaaatgggatctaattaaactaaagagcttctgcacagtaaaagaaactaccatcagagtgaacaggcaacctacaaaatgggagaaaattttcgcaacctactcatctgacaaagggctaatatccagaatctacaatgaactcaaacaaatttacaagaaaaaaacaaacaaccgcatcaaaaagtgggcgaaggatatgaacagacacttctcaaaagaagacatttatgcagccaaaaaagacacgaaaaaatgctcaccatcactggccatcagagaaatgcaaatcaaaaccacaatgagataccatctcacaccagttagaatggcaatcattaaaaagtcaggaaacaacaggtgctggagaggatgtggagaaacaggaacacttttacagtgttggtgggactgtaaactagttcaacccttgtggaagtcagtgtggtgattcctcagggatctagaaatagaaataccatttgacccagccatcccattactgggtatatacccaaaggactataaatcatgctgctataaagacacatgcacaggtatgtttattgtggcactattcacaatagcaaagacttggaaccaacccaaatgtccaacaatgatagactggattaagaaaatgtggcacatatacaccatggaatactatgcagccataaaaaatgatgagttcacgtcctttgtagggacatggatgaaactggaaatcatcattctcagtaaactatcgcaagaacaaaaaccaaacaccgcatattctcactcataggtgggaactgaacaatgagaacacatggacacaggaaggggaacatcacactctggggactgttgcagggtggggccagggggagggatagctttaggagatatacctaatgctaaatgacgagttaatgggtgcagcacaccagcatggcacatgtatacatatgaaactaacctgcacattgtgcacatgtaccctaaaacttaaagtataataataataaaataaaataaaaaataaaaataaaaaaagagatattagaggttgaatagtgctgagagatagtagaggtccaataagtcagagtagagggaccttgctgaatacatcgaacactgggtatttagttgagatgtcaaaaaccattatctaaggagtaagcctattcttgccctagagcaaatgttgctctagacatattcttaaaggactaaaaccaagcttcaataggatcaattagagccactagtaagttaactgcctgccagaaaagacaaaacaaaacaaaacaaaactcaacactctgtacaaaaaggtaacatcatagagaccttttaaaaattgtgctaaaaacccagaacaaaatttatcatctgaatcgtgtttaagtgtgcagttcaattgcattaactatatacatgttttacaaaatctctagaactttttcatcttgcaagtctgaaactctgtacacattggataacatcttcccatttctccctctctccaatccctggaaaacaccattttactttctgtttctatgagatcgaccagtttagacaatttattaaagtgaaatcatacagtatttgtcttttggtgactgcctcatttcacttagtataatgtcctcaagtttcattcatatagcacatgtatagtatgtaacaggatttttaaggctgaataatattctaatgtatgtatataccacattttgtttaatcattaatccatatatgaacatcttggttgcttctgcctcatggctattgtgaataatgctacagtgaacatcggtgtgcaaatagctcttactgatcctgctgtcaactcttttggatatatacctagaagtgcaattgctggatcatatggtaattcaatttataattttttgagggtcttacatactgttttccataatggttgtaccattttacattcccagtaatgctacatgagacttccaatttctttcatcattgactatgatgttagttgcagacttttcatatatggcctttattatgtgaggtagttttcttctatttatagtttgttgagtgtttttatcatgaaagagtgttggatttttgtcagatgatttttctgcatcagttgagatgataatgtggtttttgtccttcattctgatactgtgatgtataatattgttcaaattttatatgttgagttatccttttattggaagtaaatgccatttggtcatagtgtataattcatttattgtcctcttgaatttaatttgttagaaattttggcatcaatattcatcagagacattgctctgtagttttcttttctttagtgtcttttcctgacttcagtatctgagtaacgtttgactcataaaacgggtttagaagtgttctctcttctcctattttttggaagagtttgagaaagattggaattaattcttctttaaatgtttggtagatctttccagtgaagttatctggttgtgagtattttttttggtaggttttttgttactgattcataactccttactagtcataggagttaactattcctgttctgatgttttgatttcgtcatgacttagtcttgctatattgtatgttagcatatgattgttcatagtagtctcttacaatcatttttatttctgtggtatcagtcgtaatgtctctccttttatttctgattttatttatttgaatcttctctgttttttcttagtttagctgtttgtccaattattttcaaagaactaactcttttagtcacactcattaacaatccccacctccctaccaggctacaatacccttccaagcctctggtaaccattcttctactctatcttcattagtttaattgttttgatgtctagatcccacaaataaatgagaacatgcaatgtttgtctttctgtgcctggcttgtttcatttaacataatgacccccagttccatccatgttattgcagatgacaagatattattcttttcatggctgaatagttctccattatgtataagtacattttctttatccatccatctgttgatggacacttaggttgcttccaaattttggctattgtgaacagtgctgaaacaaacataggagtgcagatatctcttcaacatactgatttcctttcttttgggtatattcaataccccaaaaaaggatcatatgttagagcaatttttcatttttttgaggaatctctaaactcttctccatagtggttgtacaaatttacattaccatcaacagtgtgtaaggattgtcttttcttcgcatcctcaccagcatttgttattgcctctcttttggacataagccattttaactggggtgagataatatctcattgtagctttgatttgcaattctctgatgatcaatgatgttgtgcaccttttcatttgtatgttcaccatttgtacatcttcttttgagaaacatctattcaaatcttttgcccattttttcattgaattattagatgtttcctatagagttatttgcactccttatgtattctgattattaatcccttgtcagatgggtagttagcaaatattttctcccattctgtgagttgtctcttcactttgtcaattgtatccatggctgtgaagaagcctcttaacttgatgtgataccatttgtacatgtttgctttggttgcctgtgcttgtggagtattactctcagatatttttgcacagaccaatgttccaaagaatttctccaatgtttccatgtagtcatttcatagcttgagtttatagatttaatttttaatccattttgtttcctttttgtatatgatgagagattggggtctagtttcattcttccgtatatggatatcaagtttttgcagcaccatttattgaataatgccttttcctcattgtatgatcttagctcctttataaaaaatgagtcgctgtagttatgtgggttatgttatgtttctgggttctctattctgttctgttggtctacatgtctatttctatggcagtactctgcagttttgattactatagctctgtaatataatttaagtcaggtaatgtgattcctccagttttgttctttttccttagaatagctttggctattctgggtcttttgtggtttcatataaattttaggattgttttttctatttctgagaagaatgtcattggtattttgataggtattgcattggatctgtagattgcttttggtagtatggacagtttaacaatattgattcttctgatcctgaacatagaatatttttcattttttgatgtccccttccatttctttcatcggtgctttatagttttcattatagagctcttttgcttctttggttaaattaattcctaggcatttaatttttggtgaagtctttaggtttttccaaatatgagataatattgtctgcaaaaaggataattttgctttttcctttccaatttggatggactttatttctttctcttgtctgattgctctagctaggacttccagcattatgttaaataatagtggtaaaagtaagcatccttgttgtgtttcagatcttagataaaaggctttcaattttttcccattccatatgatattagttgtgggtctgtcatacatggcttttattatgttgatgtattttccttctatacccagttttttcagtgtttttatcaagaagggatgttgaattttatcaaatgctttttcagcatcatttgaaatgatcatatggtttttttctccattctattgatatgatatattacattgattaatttgcatatgttgaatcctccttgcattccagggagatatcccacttggtcatgatgaatgatctttttgatgtattgttgaattctatttgctagcattttgttgaggatttttaaatcaatattcatcagagatattggctgtagtttgctttgttgatgtgtctttgtccagttttggtatcagagtaacactgacctggtaggatgagtttggacatactccctcctccactattttccagaataatttgagtacaactggtattccttcttctttaaatgtttgttaggattcagcagtgaagtcattgagtcctgggttcttcttatggggagacattttattacaacttaaatcatgttacttgttattaatctgttcagattttggatttcttcctggttcaatcatgctaggttgtatgtgtctaggtatttatcaatttcttctagattttctaatttattggtatatagttgctcatataagccactaatgatcctttgaatttctgcagcacctcagttgtaatgtctctttttcatttctcattgtatttacttggagcttctctcgttttctcttaggtagtctggctaaagatttgttaattttgtttaacttttcaaaaacccaactctttgtttcactgaaattttatattgttttcttcatttcaatttcatttatttctgctctggtatttattacttcttttcttctaccaattttgggtttggtttgctcttgcttttctagttccttgaaatgcatcattaggttgtttatttgaagtttttcttgttttttgatatagacacttagagctataaacgtccctcttagtactgtttttgctgaatcccgtagattttggcatgttgtattttcttaatcatttgtttcaagaaaattttcaatttccttcctaatttctttattgacccactggtcattcaggagcatcttgtttaatttccatgtgtttttatagtttccaaagtttctctcattattgatttctagttttattccattgtggtaagagaagatgcttgatataatttcaattttttgaatgttttaagacctgttttgtgacctaacatatagtctttccttgaaaatgatccatgtgcagaggaaaagtatgtgtattcttcagctgttggattaaatgttctgtagataactattaggtctatttggtgtatagtgtagttgaagtctgatgtgtctttgttgattttctgtctggaagatctgttcagtgttgaaagcagggtgttgaagtctccagttattattatattggggtttatctctcactttaactctaataatatttgtattatatttctaggtgctccagtgctcagtgcaaatatatttaaaattattttatcctcttactgaattgacccctttaccattatatagtgaccttctttgtctcttagtttttgtcttgaaatctattttgtctgacaaaagtatagctgttcctgctcttttttggtttccattggcatgggatatattcttccatccccttatttttagtctatatctgtctttatagcttacctgtgtttcttgtaggcaacagattactgggtctttttttttttttatccattcagccattctatgtcttttgattgaagagtttagtccattgacattcaatgttgttggtaagtaaggacttactcttgccattttgttatttgttgtctggttgttttgtggttttctcttctttctttcctttctgtcttccttttagtgaaggtaattttgtctggtgatacaacttagtttcttgctttgtgtgtgtgtgtctgcatatcagttctatgttatttggtttgaggttaccatgaggcttgcaaatactatcttataacaattattttaagctgataataacttaacactgtttacataaacaacaaacaaaaagaaaactaataaaaacttcacaccttaacattgtttccacacccctccattttaaaactttttgttgtttctagttatatcttattgtactacctatgtattgaaaagttgtagttatttctttggttcatcatttagtgcttctgcaaatatgggagtagtttacataccacagttacagtgttataatattctgtgtttttctgtgtacttactattgccactgagttttgtaccttcagattatttcttattgttcattaatatccttttcattctaattgaagtactccctttagcattttttgtaggacatatctggggttgatgaaattcatcagcttttgtttgttagggaaagtctttattcctcctttatatttgaaagacatttttgtcagatatactattctagtgtaaaagttttttttcctgcagccctttaaacatagcatgcaaacttctcttggcctgtaagggttccactgaagagtctgctgccagatgtatgtgaatggtgctccattgtatgtgatttgtttctttcctcttgctgccttcaggatcctttgtttatccttgatctttgggggtttgattattaaacaccttgaggtggtcttctgtgggttaaatctgcttggtgttctataaccttcttgtacttggatattgacatttttgtctagatttgggatattctctattattatccctttgaataaactttctgcccccatctcttactctaccttttctttaaggccaagaaggcttagatttgcccctttgaagctattttctagatcctgtaggtgtgcttcattgttttttattctttttccttttgtctcctctgtgtattttcaaatagcccgtctttatgctcactagtgctttcttctgcttaatcaatcttgctgttaaaaggctctgatgcattctttaatataccggttgcattttgcaactccagaatttctgcttgaatctctttaattatttgaatctctgtgttaaattaatctgatagaattttgaatttattctctgtgttatcttcaatttctttgagttttctcaaaatagctattttgaattctatatctgaaaggtcacatagctctgtttctccaggctttgtccctggtgccctatttagttcatttggtaaggtcatgtttttcctggattgtcttgatacttgcagatgttcatccgtatctgggcattgaagagttatgtatttattatagtcttcacattctgggcttgtttgtacctgtctttcttgggaaggctttccaggtatttgaaaggacttgggcattgtgctgtaaggtgtatctgctttaggggggcacacaaagcccactaacactagttcttgcagactcatagtggtgttaccttcatggccttagacaagatccagaataattatctggattaccaggcagagactcttgttctctttccttgagcaaaagacctgaatagacattcctcaaaaggaaatatgtgagtggctaacaggtttctgaaaataatgctcagcatcactaaccatcagggaaatgcaaataaaaaccacaatgaaatatcatttcacctcaattagaatggctactatcaaaaagacaaaaagtaatgaatgctgacatagatgtggagcaaggaaaactcttatacactactggtgagaatgaaaattactacagtcattataaaaaacagaatggaagttcctcaaaaaattaaaaatagaactactggtggaggttccaagatggccaaataggaagagctccagtctgcagctcccagcctgagtgacacagaagatgggtgatttctgcatttccaactgaggtatctgcatttccaactgaggtactgggttcatctcactggggcttgtctgacagtgggcacagctcatggagcagggtggggcattgcctcacccaggaagcacaaagcgtcggggaattccctttcctagcaaagggaagccgtgacagacagtacctggaaaatcgggacactcccaccctaatactgcacttttccaacggccttagcaaatggcacacaggagattatattctgtgcctggcttggagggtcccacacccatggagcctcgctcactgctagcacagcagtctgagattgaactgcaaggcagtagcgaggctgagggaggggcatctgccattgctgaggcttgagtaggtaaacaaagccaccaggaagctcgaactgggtagagcccatggcagctcaaggaggcctacatgcctctgcagactccacctctgggggcagggcatagcagaacaaaaggcagcagaaacttctgcagacttaaacgtccctgtctgacagctttgaagagagtagtggttctcccagcatggagtttgaaatctgagagtggacagactgcctcctcaagtgggtccctgacccctgagtagcctaactgggagacaccttccagtaggggctgactgacacctcatacagctgggtgcccctctgagatgaagcttccagaggaaggatcagacagcaacatttgctgttctgcagcctctgctggtgatacccaggcaaacagggtctggagtggacctccagcaaactccaacagaccagcagctgagggtcctgattgttagaaggaaaactaataaacagaaatgacatccacatcaaaaccccatctgtacatcaccatcatcaaagaccagaggtagataaaaccacaaagatggggagaaaccagagcagagaagctgaaaattctaaatatcagagtgcctattcccctccgaaggaatgcagctcctcgccagcaatggaaaaaggctggatggagaatgactttgacgagttgagagaagaaggcttcagacaatcggtaataacaacttctctgagctaaaggaggatgtttgaacccatcacaaagaagcaaaaatccttgaaaaaagattagatgaatggctaactagaataaagagtgtagagaagtccttaaatgacctgatggagctgcaaaccatccacgagaactacgtgatacgtgcacaagctacagtagccgatttgatcaagtggaagaaagggtatcagtgattgaatatcaaatgaatgaaatgaagcgagaagagaagtttagagaaaaaagagtaaaaagaaatgaacaaagcctccaagaaatatgggactatgtgaaaagaccaaatctacatcttattggtgtacctgaaagtgacagggagaatggaaccaagccagaaaacactcttcaggatattatccagaaaaacttccccaacctagcatggcaggccaacattcaaattcaggaaatacagagaacaccacaaagatactcctcgaaaagagcaactccaagacacataatagttagattcaccaaagttgaaattaaggaaaaaatgttaagggcaggcagagagaaaggttgggttacctgcaaagggaagcccatcagacaaacagcagatctcttggcagaaactctacaagccagaagagagtggaggccaatattcaacatacttaaagacaagaattttcaacccagaatttcatatccagccaaactaagcttcataagtgaaggagaagtgaaatcctttacagacaaacaaatgctgagagattttgtcagcaccaggcctgccttacaagagctcctgaagaagcactaaacatggaaaggaacaaccagtaccagcaactgcaaaaacatgtccaattgtaaagaccatcgacgctatgcagaaactgcatcaactactgagcaaaataaccagctaacatcataatgacaggatcaaattcacacataacaatattaaccttaaatgtaaatggactaaatgctccaattaaaagacacagactggcaaatgggataaagagtcaagaaccatcagtgtgctgtattcaggagacccatctcacatgcagagacacacataggctcaaaataaagggatggaggaagatctaccaagcaaatggaaaacaaaaaaaaggaggtgttgcaatcctagtctctgataaaacagactttaaaccaacaaagatcaaaagagacaaagaaggccattacataatggtaaagggatcagttcaacaagaagaggtaactatcctaaatatatatgcacccaatataggagcacccagattcataaagcaagtccttagagacctaaaaagagatttagactcccacacaataataatgggaaactttaacaccccactgtcaacattagacagatcaacgagacaggaagttaacaaggatatccaggaattgaactcagctctggaccaagcagacccaatagacatccacagaactctccaccccaaatcaacagaatatgcattcttctcagcaccacatcacacttattccaaaattgaccacatagttggaagtaaagccctcttcagcaaatgtaaaagaacagaaattataataaactgtctctcagaccacagtgcaatcaaactagaactcaggattaagaaactcactcaataccattcaactacatggaaaatgaacaacctgctcctgaatgactactgggtacataacgaaatgaaggcagaaataaagatgttctttgaaaccaatgagaacaaagaaacaacataccagaatctctgggacacatttaaagcagtgtgtagagggaaatttatagcactaaatgcccacaagagaaagcaggaaagatttaaaattgacaccctaacatcacaattaaaagtactagagaagcaagagcaaacacattcaaaagctagcagaaggcaagaaataactaagatcagagcagaactgaaggagatagagacacaaaaaaacccttcaaaaaataaatgaatccaagagctgggtttttgaaaagatcaacaaaattgatagaccactagcaagactaataaagaagaaaagagagaagaatcaaacagatgcaataaaaaatgaaaaagaggataacaccaccgatcccacagaaatacaaactaccatcagagaatactataaacacctctatgcagataaactagaaaatctagaagaaatggataaattcctggacacatacaccctcccaagactaaactggaaagaagttgaatccctgaatagatcaataacaggttctgaaattgaggcaataattaatagcctacgaaccaaaaaaagtccaggactagacaaattcacagccaaattctaccagaggtacaaagaggagctggtaccatttcttctgaaacaatcccaatcaatagaaaaagagggaatcctccctaattcattttatgaggccaacatcatcctgataccaaagactggcagagacacaacaaaaaaaaggagaattttagaccaatatccctgttgaatattgatgcaaaaatcctcaataaaatactggcaaaccaaatccagcagcacatcaaaaagcttatccaccacgatcaagttggcttcatccctgggatgcaaggctggttcaacatacagaaatcaataaacataatccatcatataaacagaaccaaagacaaaaaccacatgattatctcaatagatgcagaaaaggccttcgacaaaattcaacagcccttcatgctaaaaactctcaataaactaggtattgatgggacatatgtcaaaataataagagctatttatgacaaacccacagccaatatcatactgaatgggcaaaaactggaagcattccctttgaaaactggcacaagacaggaatgccctctctcaccactcctattcaacatagtgttggaagttctggccagggcaatcaggcaagagaaagaaataaagtgtattcgattaggaaaagaggaagtcaaattttccctgtttgcagatgacatgattgtacatttagaaaaccccgtcgtctcagcccaaaatctccttaagctgagaagcaacttcagcaaagtctcaggatacaaaatcaatgtgcaaaaatcacaagcagtcctatacaccaataacagacaaacagagagccaaattatgagtgatctcccattcacaattgcttcaaagagaataaaatacctaggaatccagtttacaagggatgtgaaggaactcttcaaggaaaactacaaaccactgctcaacaaaataaaagaggacacaaacaaatggaagaacattccatgctcatggataggaagaatcaatatcgcaaaaatggccatattgcccaaggtaatttatagattcagtgccatccccatcaagctaccagtgactttctacacagaattgggaaaaactactttaaaattcatatggaaccaaaaaagagcctgcattgccaagacaacactaagccaaaagaacaaagctggaggcatcatgctacctgacttcaaactatactacaaggctacagtaaccaaaacagcatggtactggtaccaaaacagagatgtagatcaatggaacagaacagaggcctcagaaataacaccacacatttacaaccatctgatctttgacaaacctgacaaaaacaagaaatggggaaaggattccctatttaataaatggtgctgggaaaactggctagccatatgtagaaaggtgaaactgaatcccttccttacactttatagaaaaattaattcaagatggattaaagacttaaatgttatatgtaaaaccataaaaaccctagaagaaaacctaggcagtaccattcaggacatagacatgggcaaggacttcatgattaaaacaccaaaagcaatggcaacaaaagccaaaattgacaaaatgggatctaattaaactaagggcctctgcagagcaaaagaaagtaccatcagagtgaacaggcaacctacagaatgggagaaaatttttgcaatctacccatctgacaaagggctaattaccagaatctacaaagaacttaaacaaatttacaagaaaaaatcaaacaaccccgtcaaaaagtgggcaaaggatatgaacagacacttctcaaaagaagacatttatgcagccaacagacccatgaaaaaatgctcagcatcactgtccatctgagaaatgcaaatcaaaaccacaatgagataccatctcacaccagttagaatggcaatcattaaaaagtcaggaaacaacaggtgctggagaggatgtggagaaataggaacacttttacactgttggtgggactgtaaactagttccaccattgtggatgacagtgtagcaattcctcaaggatctagagctagaaataccatttgacccagccatccgattactgggtatataaccaaaggattataaatcatgctgccataaagacacatgcacatgtatgtttattgtggcactattcacaatagcaaagacttggaaccaacccaaatgtccatcaatgatagactggattaagaaaatgtggcacatatacaccatggaatactatgcagccataaaaaaggatgagttcatgtcctttgtagggacatgggtgaagctggaaaccatcattctgatcaaactatcccaaggacagaaaaccaaacaccacatgttctcactgataggtgagtattgaacaatgagaacacttggacacagggtggggaacatcacataaaggtgcctgtcatggggtggggggagggaggagggata

SEQ ID NO: 590 - DNA, 8041 bp, Homo sapiens
ggtatgaattttatcataaattaagtaactctacattccattaactctctttttaaatagttcaaatgggggggacagtaattttttttaatacttatgaagtgttacctcaaaataatattgcccatggatatcaaatcagtctgaatgaacataactgaaaaatattcagaatgcttgaaatgacttagaagtaatctttaagagctaaccctaggggcccagtcctcctttcatagaggtgagctccttagctgaaatacatctctaaaagaccttctgtgaaaagtgagaggtgcaaaagttcctgaatgaccaaataccctgctgccaaaacgaaaagcaatttcatttaaaagtatattccgtttatcttctgcgcagcacttgaattttattgagatagagatattctgtacaccaaacccaatttaattcccataaataaagcagagtgggtgaacatgatcctctattttcttttgttgcagagaaacgctgattcctgataactggtggtgtttcatttgtttttgtttgatttttcacgttagaggagcagagttttcagacacttaggcctacaagacttaacccctgttgggcaaggggatttaggggaggaagcacatcagtaatatcagcactcaactataatgtgtccaagtgaaaatggctcaaagtaaaagagatccttagatgcataataaaaaagtcatgccctttcttagcaagcaggataaaaacagactgataaaataatttccagtaccaacatcttttccatctgtttttctatcatttctagaactaagtgccaaaaacgctttttttaagaaaaaagttttgctcaaagttgccttctctctcttttctatttatttctctgctttttaaaattacattttatgttctaaaatcactgatctgagcttattactttcttattgaaaaactctcagaggtttccaaaagctaaagagcacttaaaagttcaaactcctagcacaatattcgagactctccatgtgagacttaaacttgcattcccaatacacattcccaacagcgtcattcagacattattaggaaagccaatcagaaacttttacaatttctgttccatgctctttcttttccttattccaaaccttttgtcaaattgtttcctcccataacatctgtttaatttctattcatccttcaaacttagtcactttctctaagatgcctacctagctagatccccatataaggttttgatatcactcttctcacagcactttcctatggcactcataatctaagttggattatatttttgtgtgtatttcttacacatcagggcaaatatgtttggggataaaggtgtttagaaagaataacccaactattttcaccattgcagccctagaattttgccttaaaatacaaagtcagggcacagtatgtttgctgtgttagagaattaaaataatacttgcctcttttctttttcttcctttcctttttacaaaaatatcctcatttcttctcttgtctttttgtctttttttctccacaattctacaaactttcttcttttccattttcctcttttactgtcttcttatttcttcttcattttttattccttcacttctttgtctgccccttattttcttcttcaatatcataggttttgcacaaattttttcaacatctattcacctattcttttatattgctagtgtaaaatttttaatatgttctgaagcaaatttcatctgtgcataattattcaataatttactcattcatttcatttaattttattaaatatttgttgtttattcatgagtaccaagcactcttctgagcactagagatctgaattgagtaagactgacagaatcacttctcatggaagttaagttattgtagagacagagaaaaatcccacaaagaatcaaaaaatactgtagaatggtaggtggtgaatataaaaaagagaaacttaaaatgacaaattcttcatctgaataatgacagggttataactattagatttacccttcagccataaacaaatataacactcaaaaaatacataagcagcaactctttttagacatctaacaacagactccacaacactgctatcctggaaaagaaagaactactggaggtaagcaacacatttaccctggctttttgattaggaacgcagtgaaatagaacccaaagagaaattgatggtgtctaaggtagacattattagcattgtggctgggatttatgaagcaggttagtagagaggaggtagctgtttagagatgaagcttcagaaatcttttctaaggtcaccttaagccactggcttaatattaggcatttatagggcaagatttgctgaaaccctgaagagaactacttgagggttgtgagccaaatagagatattagaggctgcatttccatctgagctttgaagagagcagtgattctcccagcacgcagctggagatctgagaaagggcagactgcctcctcaagtgggtccctgacccctgacccccgagcagcctaactgggaggcaccccccagtaggggcagactgacacctcacacggccgggtactcctctgagacaaaaattccagaggaacgatcagacagcagcatttgcggttcacaaaaatccactgttctgcagccaccgctgctggtacccaggcaaacaaggtctggagtggacctctagcaaactccaacagacctgcagctgagggtcctgtctgttagaaggaaaactaacaaacagaaaggacatccacaccaaaaacccatctgtacatcaccatcatcaaagaccaaaagtagataaaaccgcaaagatggggaaaaaacacagcagaaaaactggaaactctaaaaagcagagcacctctcctcctccaaaggaacgcagctcctcaccagcaacggaacacagctggacagagaatgactttgacgagttgagagaagaaggcttcagacgatcaaactactctgagctacaggaggaaattcaaaccaaaggcaaagaagttgaaaactttgaaaatgattttgacgaatgtataactagaataactaatacagagaagtacgtaaaggagctgatggagctgaaagccaaggctcgagaactacgtgaagaatgcagaagcctcaggagctgatgcgatcaactggaagaaagggtatcagtgatggaagatgaagtgaatgaaatgaagcgagaagggaagtttagagaaaacagaataaaaagaaacgaacaaagcctccaagaaatatgagactatgtgaaaagaccaaatctacgtctgattggtgtacctgaaagtgatggggagaatggaaccaagttggaaaacactctgcaggatattatccaggagaacttccccaatctagcaaggcaggccaacgttcagatgcaggaaatacagaacgccacaaagatactcctcaaaaagagcaactcaagacacataattgtcagattcacaaaagttgaaatgaaggaaaaaatgttaagggaggccagagatgaaggtcgggttacccacaaagggaagcccatcagactaacagcggatctctcggcagaaactctacaagccagaagagagtgggggccaatattcaacattcttaaagaaaggaattttcaacccagaatttcatatccagccaaactaagcttcataagtgaaggagaaataaaatactttacagacaagcaaatgctgagagattttgtcaccaccaggcctgccctaaaagagctcccgaaggaagcactaaacatggaaaggaacaaccggtggcagccactgcaaaatcatgccaaattgtaaagaccatcgaggctaggaagaaacggcatcaactaacgagcaaaatagccagctaacatcataatgacaggatcaaattcacacataacaatattaactttaaatgtaaatggactaaatgctccaattaaaagacacagactggcaaattggataaagagtcaagacccatcagtgtgctgtattcaggaaacccatctcacgtgcagagacacacataggctcaaaataaaaggatggaggaaaatctaccaagcaaatggaaaacaaaaaaaggcaggggttgcaatcccagtctctgataaaacagactttaaaccaacaaacatcaaaagagacaaagaaggccattacataatggtaaagggatcaattcaacaagaagagctaactatcctaagtatatatgcacccaatacaggagcacccagattcataaagcaagtcctgagtgacctagaaagagacttagactgccacacaataataatgggagactttaacaccccactgtcaacattagacagatcaacgagacagaaagttaacaaggatacccaggaattgaacccagctctgcaccaagcggacctaatagatatctacagaactctccaacccaaatcaacagaatatacatttttttcagcaccacaccacacctattccaaaattgaccacatagttggaagtaaagctctcttcagcaaatgtaaaagatcagaaattataacaaactgtctctcagaccacagtgcaatcaaactagaactcaggattaagaaactcactcaaaaccactcaactacgtggaaaatgaacaacctgctcctgaatgactactgggtacataatgaaatgaaggcagaaataaagatgttctttgaaaccaacgaaaacaaagacacaacacaccagaatctctgggacacattcaaagcagtgtgtagagggaaatttatagcactaaatgcccacaagagaaagcaggaaagatttaaaattgacaccctaacatcacaattaaaagacacagaaaagcaagagcaaacacattcaaaagctagcagaaggcaagaaataactaagatcagagcagaactgaaggaaatagagacacaaaaaacccttcaaaaaattaatgaatccaggagctggttttatgaaaggatcaacaaaattgatagaccactagcaagactaataaagaagaaaagagagaagaatcaaatagatgcaataaaaaatgataaaggggatatcaccaccgatcccacagaaatacaaactaccatcagagaatactacaaacacctctacacaaataaactagaaaatctagaagaaatggataaattcctggacacatacaccctcccaagactaaaccaggaagaagttgactctctgaatacacaggatctgaatcacaggatctgaatcacaggatctgaaattgtggcaataatcaataacttaccaaccaaaaagagtccaggaccagatggattcacagccgaattctaccagaggtacaaggaggagctggtaccattccttctgaaactattccaatcaatagaaaaagagggaatcctccctaactcattttatgaggccagcatcatcctgataccaaagctaggcagagacaaaaccaaaaaagagaattttagaccaatatccttgatgaacactgatgcaaaaatactcagtaaaatactggcaaaccaaatccagcagcacatcaaaaggcttatccaccatgatcaagtgggcttcatccctgtgatgcaaggctggttcaatatacacaaatcaataaatgtaatccagcatataaacagaacaaaagacaaaaaccacatgattatctcaatagacgcagaaaaggcctttgacaaaattcaacaatgcttcatgctaaaaactctcaataaattaggtattgatggaacgtatctcagaataataagagctatgtatgacaaacccacagccaatatcatactgaatgggcaaaaactggaagcattccctttgaaaactggcacaagacagggatgccctctctcaccactcctattcaacatagtgttggaagttctggccagggcaattaggcaggagaaggaaataaagggtattcaattaggaaaagaggaagtcaaattgtccctgtttgcagacgacatgattgtatatctagaaagccccaatgtctcagcccaaaatctccttaagctgataagcaacttcagcaaagtctcaggatacaaaatcaatgtacaaaaatcacaagcattcttatacaccaataacagacaaacagagagccaaatcatgagtgaactcccattcacaattgcttcaaagagaataaaatacctaggactccaacttacaagggatgtgaaggacctcttcaaggagaactacaaaccactgctcaatgaaataaaagaggatacaaagaaatggaagaacattccatgctcatgggtaggaagaatcaatattgtgaaaatggccatactgcccaaggtaatttatagattcaatgccatccccatcaagctaccaatgactttctacacagaattggaaaaaactactttaaagttcatatggaaccaaaaaagagcccacaccaccaagtcaatcctaagccaaaagaacaaagctggaggcatcatgctacctgatttcaaactatactacaaggctacagtaaccaaaacagcatggtactggtaccaaaacagatatatagatcaatggaacagaacagagccctcagaaataacaccgcatatctacaactatctgatctttgacaaacctgagagaaacaagcaatggggaaaggattccctagttaataaatggtgctgggaaaactggcttgccataggtagaaagctgaaactggatcccttccttacaccttatagaaaaattaattcaagatggattaaagacttaaacgttcgacctaaaaccataaaaaccctagaagaaaacctaggcattaccattcaggacataggcatgggcaaggacttcatgtctaaaacaccaaaagcaatggcaacaaaagccaaaattgacaaatgggatctaattaaactaaagagcttctgcacagtaaaagaaactaccatcagagtgaacaggcaacctacaaaatgggagaaaattttcgcaacctactcatctgacaaagggctaatatccagaatctacaatgaactcaaacaaatttacaagaaaaaaacaaacaaccgcatcaaaaagtgggcgaaggatatgaacagacacttctcaaaagaagacatttatgcagccaaaaaagacacgaaaaaatgctcaccatcactggccatcagagaaatgcaaatcaaaaccacaatgagataccatctcacaccagttagaatggcaatcattaaaaagtcaggaaacaacaggtgctggagaggatgtggagaaacaggaacacttttacagtgttggtgggactgtaaactagttcaacccttgtggaagtcagtgtggtgattcctcagggatctagaaatagaaataccatttgacccagccatcccattactgggtatatacccaaaggactataaatcatgctgctataaagacacatgcacaggtatgtttattgtggcactattcacaatagcaaagacttggaaccaacccaaatgtccaacaatgatagactggattaagaaaatgtggcacatatacaccatggaatactatgcagccataaaaaatgatgagttcacgtcctttgtagggacatggatgaaactggaaatcatcattctcagtaaactatcgcaagaacaaaaaccaaacaccgcatattctcactcataggtgggaactgaacaatgagaacacatggacacaggaaggggaacatcacactctggggactgttgcagggtgggggcagggggagggatagctttaggagatatacctaatgctaaatgacgagttaatgggtgcagcacaccagcatggcacatgtatacatatgaaactaacctgcacattgtgcacatgtaccctaaaacttaaagtataataataataaaataaaataaaaaataaaaataaaaaaa

SEQ ID NO: 591 - DNA, 468 bp, Homo sapiens
gctgataaagacgggaataatccctaccgggttgaccagcgcaaataacccgatgaaaaatttgaagtaaacgggaaaatcaaaaaaggtctgaatcacggttagctccgaagcaaaagccggataatgttagccataaataaggttgaaaagacgcgctgacaatacgccttttgacagcatttttcacctcctaactacttaaaattgctatcattcgttattgttatctagttgtgcaaaacatgctaatgtagccaccaaatcatactacaatttattaactgttagctataatggcgaaaagcgatgctgaaaggtgtcagctttgcaaaaatttgatttggatcacgtaatcagtacccagaagtgagtaatcttgcttacgccacctggaagtgacgcattagagataataactctaatgtttaaactcttttagtaaatcacagtgagtgtgagcgcgag

SEQ ID NO: 592 - DNA, 422 bp, Homo sapiens
cacctgccactcacccactgctgtgcagcttggttcctaacaggccatggactggtacaaggaataatgcagggttggggacccacaaggttacatagagtattggttaaaaaaaagtttgccctggccgggcgcggtggctcacgcctgtaatcccagcacttcgggaggccaaggtgggtggatcacctgaggtcgggagttcgagaccagcctgaccaacatggaaaaaccccgtttctactaaaaacacaaaataagccaggcgtcgtggcacatgcctgtaatcccagctactcgggaggctgaggcaggagaatcgcttgaacctgggaggcggaggttgcagtgagctgagatcatgccattgcactccagcctaggcaacaagagcgaaactccgtctcaaaaaaaaaaaaaaa

SEQ ID NO: 593 - DNA, 422 bp, Homo sapiens; identical to SEQ ID NO: 592

SEQ ID NO: 594 - DNA, 325 bp, Homo sapiens
atgctggtgacaccttagccactggagacaaagcagaagttactgagatgcctaatagtgattctttacctgaggatgcagaagtgcattgtgattcagctgcagtttcacatgagccaacaccagctgaccccagaggggaggggcatgaaaatgcagctgtgcagggtgcaggggctgccgccattgggccccctgtgcagcctcaggatgccaacgccctggagccccctctcaatggagacgtgactgaggatacacttgctgaatgtattgattccgtcagccttgaggcagaacccagatccgaaatacccctgcaaga

SEQ ID NO: 595 - DNA, 325 bp, Homo sapiens; identical to SEQ ID NO: 594

SEQ ID NO: 596 - DNA, 335 bp, Homo sapiens
tcacagtccagaccatgcctgtatatggatggatgagggagcaaaagttcccaggggctcaagagctgccaagggccactctgcctccagctaaaggggctgcaccgcaatgctcatcttccagggaaagggccagatcatggggaagccacctgtgtgtgggagagcagaatccatcccatgcctctggattttgttcatgggacacaaaggtaaagatgggcaggtgggaagaggatgttctcattccaggacatgtgttttgagaccactttctctctgctgtgccccaggatcctttctggggccttggctggttctcacactatgggttt

SEQ ID NO: 597 - DNA, 10339 bp, Homo sapiens
ccaaaggtaccagtggctcagccctcactgctctcataagccaggtcttagaggctcccggagtgtatgtctttggagaacttctggagctggccaacgtgcaggaggtaagaacggtttgcaaacaatttctctttattctaagactctgtaattctccaggtttccaaagaatttcagtgctgaagtattgtgaacctgtgaggtaccctattgtgagacagatgggaattggtggggcagagggagagattgagagaatatccttggctccttttatccagtatttttatcttaccttgggtaaaattagattgttgctaataataacctaaaagatagtaaaaaagtcaaattgatcctgataaattagaaaagtagtgctgtaagcatgggctgtttaataggagtagattcatgcattcttaaggaccagaaacctccagtgcaatatcgataaggaagattggtcagggacacacagcagaaacatactgctattgaacataagatggacatgaataggagtgtattgttcttgaggaaaagggcagtgttgtgctaaatgtgttagatgtgttagatatgacatgaaaagctaggacatagttcattttacttgtttgcttgcttgttattaaaaccttggatatccagttttggtcattgtgcctcaaaaatgagaagatccattgaacagaaggaacaaagagatgtaaagcaatctatacttctcaacctctactttccaatttgaacatttttatttatttatatttattcacttattgagaaaagtctgtaagcatctttattgttttgtggggtggaggctggtgctcaggagcttttggcggattggtggggcaggtccccttcctcttcatcctcacaggcttctggctatgcagactggtgctggctctgtggaagctgccatgcatagatctgggtgatggtacttcttgtggagcatgtgctggatgctgttgagagtggccccggagttcttggtggtggcgatttgcatataggaggtggtttgcttttgttgggcagtttatcaccttcatgaccaccacaacacctttgctgttggctccacacccacagtcagttttaacaggagtttcagtgaatcagttagttgtaaccaaaggagttgccggccttcagtttattggattcggtgctgtgtgtctgcctattcctcttgatggggaaactggagcagttccctacagtccagccatttcaggtgcccagttatgtctcctctacctgtgatgttcagagatgagaagagccacttttactttttcactgtaaatttttatttaatgtcagccttgcttgccgaactataaactctgtgaggaggtctgtagtgctcaccattgtttctttagagctgaatacgtagcctgacacacagtaggctttcaataaaaatttaatttaccagaagtggaaaatgagttttatgaagaaaatttcagaaaactgagttcatttttcaacacaagagatgaccaaggggtaatatgttccttcaggttcatgaacagcctgcatgaatatgccaagtagttgttttgtaactgtggaagattggctaagaggagatggatggaaagtaaagtcagaaagaccttattgatttaggccagtgggagaagtgttggagtatctgctctggagaaaatgctcttttccggctagttttgttaattatgtttctgaaaaggggggctagattggatggtctttacgcaggtttcttccccttctgattcagggacttcaggaggtttgtgtaacctgagaaagtagcctgaggtattatggtgctggagttctccatagggtgcttagcagaccacctttatctccccatacattgcgtttttccatatgtgagctgagaataagctggttgcctttcagtgatctgaaattatagatgcatttcttggaagctttattttttttaatggctaaaattgagtagtatcgctattgctgtctgtagactaccacttgctattcctgtttagagtttactgggcttggtaagttggaagggtaacaggagcacgtttgtgattttttttttttttttttgagacggagtctcgctctgtcgcccaggccggactgcggactgcagtggcgcaatctcggctcactgcaagctccgcttcccgggttcacgccattctcctgcctcagcctcccaagtagctgggactacaggcgcccgccaccgcgcccggctaattttttgtatttttagtagagacggggtttcaccttgttagccaggatggtctcgatctcctgacctcatgatccacccgcctcggcctcccaaagtgctgggattacaggcgtgagccaccgcgcccggcccacgtttgtgatttaaacaacaacaacaacaacaacaaccagttaacgtaattgacagcagagaagttccaggcagaacagtggctctttcgtttttcttctacacatggctttttgccatcagcatcagtgaagagtaagtaattttaatgaacattttgatttggggcagactgataccctggttttctgtcccagcctggctttctgtcataccttatgatgtgctggtctctcccagggttcatagtccacgtgtagtcctgaaacttggaaccaaccctgagctttgttcactttgggttggtggtggctcatgccatacctaccaagctggtatgtagatagggctgctccagtctttgttttaatgcaaacagaatcttgagaagatttgaactccttccaatgcttaatgctttgtatgtgtgtgtgagagaaaagcagttcgttgggcatgctgtatagaaagtaaaacattcctgagagagagaaattaaatttggggctttaataatcttgtttattttttcccgaagaaccagagttggtagagaccccaggggccaagtaatcaaatagtacagaataaacagccatggcatctttgacacatgctcacccgtcctctgtttgaacactacagtgattggtagacagtttggtctgtggtgaactttttttttcctcttcagcttgcggaaggagctaatgctgcttatttgcagttgttgaacctgtttgcctatgggacatacccagattacataggtgagttggtgaagatccttcaaaagacttgtgttaattatgttgctcagtttggaagaccatcaaggtttgagatataaagcatggggtagtggggagacttcttgacctggctgcctcccattttgctgtgcccggtgggtgacctcacaaagggaatgttccttctcaccttttatattctagtgggtcaaatggggcctgtgtgtgctcatccacaaatgtagcccttgtttgttttccagatgagattcttgaggactggtgtttgtagggctcttggagtgctgtgaagtgcagaatacccacctgtagaatgtttcaacattttaaatattatcaaaataataccagcatattgaagaaaatttggaaaatagactttttaaaagtcactcataggctgggcgcggtggctcatgcctgtaatcccagcactttgggaggccgaggcaggcagatcacttgaggtgaggagttttacaccagcctggccaacatggtgaaaccctgtctctactaaaaatacaaaaattagctcggcgtggtggtgggcgcctgtaatcccagccactccggaggctgaggcagcagaattgcttgaacctgggagatagagactgtagtaagctgagattgcaccgctgtactccagcctgggcaacagagcgagactctgtcaaacaaacaaataaataaataaatgtcactcatatgttgctcagacatttggatgctggacttttttgtgccccttatgtttgtgttttgtattacataggtacaactatgtatacagttttatgtcttgcttgtttcttcccacttacaaacatttatccatattttaagtctttttaatatttttaatatttcataatctacttagctcattttctgttgcagggcatttgggtcattttaaattataatctgaagtattaggttgaggtatttgtatgtccaaacactaacttaccttctacccaaagcatttttttctggctttcctacccttttttaatggtatgactgtagcctgatactcagggccttcgctgcgatatccctgacttcttctttctccctggtcacttctactttgtgctgctgtcagactggacagtttgccagttcctggtacaccacatttttttctgaccttccctttgttccagggaatgtgttctgtttttctgtccttgcttactaaagaggcagcattgcacagactctgttagcagactgcctgtagccagtctggctccacttctactagttgtgtgttcgttgacaaatgaagtaaccttatgcagctcaatttcctcgtctgtaaagtgggagtaacaatacaagcccattattccttacctacactcctcgaagttagatgtttcagaatttagaatttttgggactttaaaaaggtaatatgatgcgcatgcctttttatgtaacactcccagaggaatgtggaaacaagtgggataaaaagcctgtctccgtacaggttagaaattcccaccaggtgaatttcagcaccatgcttaagaaaaaatcagtttggatatagttttttggaatccagaattatcgttaaggaattgaggacacttggagtcttgcgggttgttgtgaagatgaactggatgtgtgtatgtacgtgtggatctatgcaatccacaagatgtaaagcttgctatttatgttagctgctgcagctgctgcccttgctgttattatcatttatggttattattgaaattttgcctctttctcaaggctcaactcaaactccatctcttccatgaattctttctttttatcttctgtactttccaaatgatactgttctctttccctctcccctcccctttcatctctttctcttacccctgtctcctccccatccctctcctcctctcttctagtagcttgtacctttcttctggtagttctgccttggatttgtagctatggaaacatctgattgtaagaccgaggacaagtccagggccatgaagttgcacacctccaggtggttggtggccctggagttgtgccatgcagcagccctggcaaagcccatcttgttcatccttgattcttctcagtacagagcattgcacacaacagatgctcgatgaagatatgtttaatttaattgaatgtcacaaggggcacaaatagtactccattaagataattgccacatcattttgcttgtttgctttttaggagactaaactctgtgtttgtagaaactgagtcttttcttctttggaagtacatagtcttccaaagaagacaggaatatttgtcaaatgaataagtgcaaagtcatgatagtgattcagtagtagatttggtttggggagttggtgagcttattccataaaagaaatcctaattttattttgtgtcttgatttttgtggtgggtgggactgagcagccaacaaggagagcctgccagaactgagcacagctcagcagaacaagctgaagcatcttaccatcgtgagcttggcatcaagaatgaaggtacggtactgagccttctcttgtcttcctccttaccccaagtcagctgtctcattgacatcaatgaaggaagtcccagctgcacataggagagtcacatcataaatgcataaaatttgcttgacagaggaaaagataaaatggtgtagaaaagtactccccattccatacaggaaaagtatgcccagaagtgattgactcagcaggtcttagtcctggcatgctgtggtgccgcatgtggcatgatcattttgccatattaaggggagactgctgttaaagatatacatttttcaaatagcaaggcatctcaaggcaagttaacagcttaatctgttgctcagtacacagtgaactatgcccatgctggaggaaaaacttgctatgtcggacttgctagattttttgttgttgttgttgttgagacggagtctcactctgtcgcccaggctggaatgcagtggtgtgatctcagctcactgcaacctctgcctcccagattcgagcgattcccctactcagccccaagtagctgggattacaggcgtggaccaccccgcccggctaattttttttttttttttttgagacagagtgttgctctgttgcctgcgctggagtgcagtggcgcaacctgggcttactgcaacctccacctcctgggttcaagtgattctcctgcctcagcctcccgagtagctggaattacaggcacctgccaccatgcccataatttttatattttttagtacagtcagggtttcatcacgttggccaggctggtcttgaactcctgacctcaggtgatccacctgcctcggcctcccaaagtgctgggattacaggcatgagccaccgtgcccggcctttttaacttaaaaaattttttaaattgagacaagggtctcaccatgttgcctaggctggtctcaaccccctgacttcaagcgatcctcccatctcagcctcccaaagtgttgggattacaggtgtgagccactgcacttggtttttttgttcttggattgcaatttcagttgctgaaatcattttatctgatctaatggcacatttctgattctcagcctagcatttcaggtgggaggcctattttgttgtgaaatgaggacctgaccttttttcttgtactgattgtggacttctcaagtgtagtaaagaatgttggtacagcccaataaagaactattgttggggaattcatattggttgtgtctgagaaaacagatacaaacttcagggtgacatctgagctggcagtacccattggccacctataggtagatatgctggcctgcaagttttttttgtttgtttttgcactctgctgggcaagtagccagctctttccagtgactgggatctgttggagatttatggtgatctagcaaagtctgaaagcttccagaaggtggcagagtggcatatactcagtagttccctttctctccactggtacaagtttttaggatctctacaagtatgctgcagcatgtgaaatctgaaggctgggtgaagccaaggaggcagagaaccaggaggttgctttcttagatgttgggtcttctaggtctcatggttcatttatccacctcttgttgccctagctattaataattaccactagcctgcgtttcccgagcctagaggcagctgttggctatgggagtaatacctgcattttcgctaatgcttgccagatggtttttataatgatcacatggccttatctacagtgtatcccctactccgtgttgctgaaagacctggagatgcggaatctccgggaactagaagaccttatcattgaggctgtctacactgacatcatccagggcaagctggaccagcgaaaccagctgctggaagtggatttctgcattggccgtgacatccgaaagaaggatatcaataatattgtcaagaccctgcatgaatggtgaggctaaaaggaggagggggatatctagcatgtcttttgtgcctctccttgcaaaaatgtgattccctggtgtcagctgagggtttggggtgggcctgtagctacctgggagctggggcttagtgagccggagagtggagctacatttgtgatcacagctgtgtgataacaggagtcatttcaggcctcctggtgccttggttgtaaaatagttctttccttaaatgcaactgggagctatttaaaagtgggctataaaatgcccagggttagcaggtggagcctatgtgtcctagctgtgtgaggctagtcctgccctttccaaactcacgctcaaagtttgaccaaactcaggaaggctagtgtttgtaagattctttctttgtttttattattttttctatccctgttgaagttaacatgtttataagattcttcggataaaagaacttacgttcaaaatcagtaacatattgggctaatgtttgtaaaacaccgtgagggacatggaagacaaggagtgggtcattttaacttggaatacagactcatacaaagaatatctgataactatactctggtatataaaaagcattgggacatttgtgttttctctgttttaatggaatttgatatttgtaagagctgtctcacattctacgaggattcactgtggagtgatttaaattatttgggcttataaagccagatggactgattggagaagttttagctcagttttgaaggaaggccagggttagagtatacctggaggtgaggagagtgtgttcccaggcaggcacgtggcatgttggaagccatgaagcagacccggtgagctttgtacacaggttcgggagggagagagaatctctgctcatccccgagagaagcatatccagagaggagcagtgccactttgactccttggggcctgatgtcccctgagtttccctcacttcagctacttttacaccccaggacatgtgttgctcacccctcaccccaagttctgtcccaaatatagccccaaacaccttctctatacaacatctgccacaagtggaagttttcaatagcttacaaaacttagaataaataagaaataaacttagaaataccccaacacaaaaatggtctggcacacaaaatctagtttctgaacctgccaaagttggctgtcctattctgtttttgagatggctgacacagctttttatgtccatagtctggtttcctgtttttaagcccccaatatgtttgacatagaggtgccagactaactggttaccatgggatgtttactagtagaaactcttacaactcatgtttaggcactggaggtagattgaaacaaaattcataggctgagggctaccacatatatggcaaaatgctcacactgttggatcttaagtggagggtatggggatattcattgtagtctttcaactttttcatttttaaaaaaattaatagtggggaaaataggaggaggggtatggcaattaggaagtaacttaaacttctgagaaaaggcggaatcttcaaaacaggatgcttttaggaaatctttttttgtttgttgttttttgagacagttttgctcttgttgcccaggctggagtgcaatagtgcgatctcagctcaccgcaacctctgcctcccaggttcaagcgattctcctgcctcagcctccctagtagctgggattacaggcgtgtgcaccaggcctggctaattttgtatttgtagtagagacggggtttctccatgttggtcaggctggtctcgaattcccgacctcaggtgatccgcctgcctcggcctcccaaggtgctgggattacaggcatgagccactgcgcctggcctagaacatcttttttttctgttgagaaaaggattactcagtgccatctataaaatctattctaccttcttttttttttttttttttttgcggcagagtttcgctctgtcacccaggctggagtgcaattgcgtggtctcagctcactgcaacctccgcctcccgggttcaagtgattctcctgcctcagcctcccaagtagctgggattacaggcacccgccaccacacctggctaatttttgtatttttagtagagatggggtttcactgtgttggccaggctggtctcgaactcctgacctggtgatccacccacctcggcctctcaaagagctgggattacaggtgggagccactgcacccggcctgtcctaccttctttaatcgtatgtgctacaaaaccatcttccatgagatacaaagttgaaaattaaagctgtattctaagaaactagccccagactaccatatttgtctcctaatgtcctgcattatgtatttagaagtgcttgtctttgggaaggagtgaacgggcaagagatgtggcagagggagtattaaaggaggtccctgtaagatactggggagagctgttggggaagaatatttctgagcctggaagagacttcccaggccattctgcagctcagggctggttttctccattgtaggtgtgatggctgtgaagcagttctactgggcatcgagcagcaagttctgagagccaaccagtacaaagagaaccacaaccgaactcagcagcaggtagaagcagaggt

SEQ ID NO: 598 - DNA, 441 bp, Homo sapiens
aggaaaagcagagaggcagcagcagctctgggagaaagggacagcagacattagaggggcgagtgttctgggagcctcagagcagtgatggattttccatctttccttggaggaggggctgggtcttggaatcccctcccttctctgccccttacacacagtttgtcctgaggagcagacatgaggtctgtgctcacccaagcgctcacagtctccttctctcttcaatacccatctgctgggcctaattcttacctcaaaaaggtaactcttgattattcttaaaagtttaaaaaaaaatagtaactgtgattctggtctaagctaaaattatttttcctcaaggttgtctcccaagaaaaatgcttaaagaggccgggcacggtggctcatgcctgtaatcccagcactttgggaggccgaggtgggcggatcacctga

SEQ ID NO: 599 - DNA, 441 bp, Homo sapiens; identical to SEQ ID NO: 598

SEQ ID NO: 600 - DNA, 370 bp, Homo sapiens
gaatcatgactgtgaactgtctcctaaataatttagtgttccattattcccctccccagtacattttagatttaggtcctacacagttctagaccctggattctagggctttgcctctggaaccagcggtattggcctcacttgagagcttattagaaatgaagagtctccagcccaccctcaaatccaaggaatcaggatttactttttaacatgctccccaagtgatctgtgtgcatgttaaagtaggagaaatgctgctctgaggcatctgatcagcaggccctcccaggccctggcttcagggtagagctatttgggttgcagatagcaccatgccacactctgtgggcagagagttcaaattcca

SEQ ID NO: 601 - DNA, 370 bp, Homo sapiens; identical to SEQ ID NO: 600

SEQ ID NO: 602 - DNA, 341 bp, Homo sapiens
aaaaaatctaaaaataagacaaacgagaagtagaccctggaattttgttccagtgttcatcaagctcacataactttattttatacaccataaaaacaagaaaggcctagaaagataccccgctgacctccagacacaaggcatttattgcattctcatgactgtcatctaaacattaacaaatcaaaagaagattcttattaaggtatacatttttagtgaaccccagacattgtctatagttcaacaattccatttattaaatgctcacaagctaacttctaataattttttgtactcttgcctgcaatcaacagtgagaataacaccctgtcatatca

SEQ ID NO: 603 - DNA, 341 bp, Homo sapiens; identical to SEQ ID NO: 602

SEQ ID NO: 604 - DNA, 375 bp, Homo sapiens
gctggagtatggtggataggtgtgtgtgtggagggggtttaggggccagactgtgccatgtgggccagtagggccaggagatgcctgggattttattctaaaggtggcgggcaccctttagagggtctcagtagcaggtttggaggcagagacgggtgaaggagggagatggcagtggggctggagctgggagagtccacgtggcatggggaggtgggggagggaagagcccagataggatgcctgggatgcatgcaggagaagggatgcctgaagcaggcctgagcagggaacctctggctggagtgctccgggggcatccagagctgaggtcatccaaggggagagggggcgggagccgaggcccagcctgag

SEQ ID NO: 605 - DNA, 599 bp, Homo sapiens
aaaagtaaatttattttttttcacatcccacattacatttcttgattagcacagtcaagggtgacagagaactactctcttaaggattacctggggtctgagtcatttcagaagattacacagaattttccacagttcctgaaggtgaaagcttttcaaggcaaaataaaatctggtctatagccttttggatgaagtcaggccgacatatcacagctttgagctaaacagtgtattgaagtcctactattttgctgtaagaccctgaataaagtcttacaatgtgtaatttattcttggcccaagtttcaattctgctcttaagtgaggttatgagagagagatttccacaaattctggtgaattctcttatttgtaaagttcttctgggaaagaagtggagtaatttattccaggacttgatccacaaagtcaagataaagtccacactttgtctacatatatctcttttcctaagctctaatttattttggttagtgtgccctttcatgtaacaccaattctcggcatgtcagaatcagattccagacatgccaactttacagacatgaacaggcccatataagtcccttgtattg

SEQ ID NO: 606 - DNA, 599 bp, Homo sapiens; identical to SEQ ID NO: 605

SEQ ID NO: 607 - DNA, 262 bp, Homo sapiens
caaaaaattagctgggcgtggtgttgggtacctgtagtcccagatgcttgggaggctgaggcatgagaatcgcttaaactcgggaagcagaggttgcagtgaacggtgatcgcaccactgtactccatcttgggcaacagagtgaaactctgtctcaaaaaaaaaaaaaaacaaaaaaaaaagtctgtattcatggaatttgaattttcttctttgaatatctgaaattagtcttctaaaaaagtcggctgggcccggtggc

SEQ ID NO: 608 - DNA, 180 bp, Homo sapiens
tgcccgcgttctccgcttccattccccgaggccgctgatgcgggcggctccacctgccgggcacacgggcagccggtctctgtagtaccgcgtggtactcactgcggtaagacaaccccagagacctgggcccgatggctggcagtacccagacagtggctggactcaagctcctcctcc

SEQ ID NO: 609 - DNA, 180 bp, Homo sapiens; identical to SEQ ID NO: 608

SEQ ID NO: 610 - DNA, 262 bp, Homo sapiens; identical to SEQ ID NO: 607

SEQ ID NO: 611 - DNA, 330 bp, Homo sapiens
ctggaagactgcctttaaaaaaattaaaaagagaatttataacaaataggtgaaatacgtgatcactgagttactgaggtggatattgtattaaatatggcatggttcctggagatttggggaagttctggaggcttttttttccaatataaataaaactttcaaaaaaactgaaagacaatgttgtttattgtgcaagaacagtcaagactacttaaatgggatattgtgacgaagtgctgccaattaatgctgtatctaatctcaaatacatgcaagacttttatccttcttagtaggctgaccaaaaagactaaaagaagttgtctt

SEQ ID NO: 612 - DNA, 338 bp, Homo sapiens
gttgtgaatgacttactttttattctataaattaggtcatagccaatatttcagtacacaaacattatttttattcatttgaatcccaatatgttttcttaaattgtaggaaaaaccggtagcatatcagtcagcaaaccagaaattatatcttactgctacatctcataactacatcttactaaaacacaaacattcataatatgtagtatactatctctaaaattacataggttttgtgtacatttcttctaattgatcatgtctgcttattttcctctggattaaggatcaaggagatagtatattagatgatttgataaatttccaatgctttg

SEQ ID NO: 613 - DNA, 433 bp, Homo sapiens
attgaaatttccccaaacctaagaggtttcatctgtacatagaaatattttcaccatggaatgtatagtggttgaacttttgaagaaaagttgacttattgtctaaaagttttccatttgccctcttctaggtttgcactcaagactgacatttaccgtaatggaagctgttcatatgcccccaggaaagaatgaacaatttaatagaaaatgctaaaggagtgatattaggtgagcatctcatgtcatccgaagaaaaacataggcagattttctactctttaccttatttcccactttattttcaggatgtggggataaaaatgtagggtctgatgaatttttcaacagcttataattattagtgttattgttagaataccagaatataactaataaccaaatgtaaaatgtttggtaaggaaattgcttt

SEQ ID NO: 614 - DNA, 433 bp, Homo sapiens; identical to SEQ ID NO: 613

SEQ ID NO: 615 - DNA, 433 bp, Homo sapiens; identical to SEQ ID NO: 613

SEQ ID NO: 616 - DNA, 433 bp, Homo sapiens; identical to SEQ ID NO: 613

SEQ ID NO: 617 - DNA, 4779 bp, Homo sapiens
gaaaaaaatttagacgaatgtataactagaataaccaatacagagaagtgcttaaaggagctgatggagctgaaagccaaggctcgagaactacgtgaagaatgcagaagcctcaggagccgatgcaaccaactggaagaaagggtatcagtgatggaagatgaaatgaatgaaatgaagcgagaagggaagtttacagaaaaaagaataaaaagaaatgaacaaagcatccaagaaatatgggactatgtgaaaagaccaaatctatgtctgattggcctacctgaaagtgacggggagaatagaaccaagttggaaaacactctgcaggatattataaaggagaacttccccaatctagcaaggcaggccaacattcagattcaggaaatacagagaacgccacaaagatactcctcgagaagagcaactccaacacacataattgtcagatttgccaaagttgaaatgaaggaaaaaatgttaagggcagccagagagaaaggtcgggttacccacaaagggaagcccatcagactaacagtggatctctcggcagaaactctacaagccagaagagagtgggggccaatattcaacattcctaaagaaaagaattttcaacccagattttcatatccagccaaactaagcctcataagtgaaggagaaataaaatactttacagacaagcaaatgctgagagattttgttaccaccaggcctgctctaaaagagctcctgaaggaagcactaaacgcggaaagcaacaaccggtaccagccactgcaaaatcatgccaaattgtaaagaccatcgaggccaggaagaaactgcatcaactaatgagcaaaataaccagctaatatcataatgacaggatcaaattcacacataacaatattaactttaaatgtaaatggactaaatgctccaattaaaagacacagactggcaaattggataaagagtcaagacccatcagtgtgctgtattcaggaaacccatctcacgtgcagagacacatataggctcaaaataaaggatggaggaagtttacctatcaaatggatactcatatgtcaggtgttgcaatcctagcctctgataaaacagactttaaaccaacaaagatcaaaagacacaaagaaggccattacataatggtaaagggatcaattcaacaagaagagctaactatcctaaatatatatacacccaatacaggagcacccaggttcataaagcaagtcctgagtgacctacaaagacacttagactcccacacaataataatgggagactttaacaccccactgtcaacattagacagatcaacgagacagaaatttaacaaggatacccaggaattgaactcagctctacaccaagcagacctaatagacatctacagaactctccaccccaaatcaacagaatatacatttttttcagcaccacaccacacctattccaaaattgaccacatacttggaagtaaagctctcctcagcaaatgtaaaagatcagaaattacaacaaactgtctctcagaccacagtgcaatcaaactagaactcaggattaagaaactcactcaaaaccgctcaactacatgcaaactgaacaacctgctactaaatgactactggctacataacggaatgaagacagaaataaagatgatctttgaaaccaacgagaacaaagacacaacataccagaatctctgggacacattcaaagcagtgtgtagagagaaatttatagcattaaatgccctcaagagaaagcacgaaagatccaaaattgacaccctaacatcacaattacaagaactagaaaagcaagagcaaacacattcaaaagctagcagaaggcaaggaataactaaaatcagagcagaactgaaggaaatagagacacaaaaaacccttcaaaaaattaatgaatctaggagctggttttttgaaaggatcaacaaaattgatagaccgctaccaagactaataaagaaaaaagagagaagaatcaaatagacgcaataaaaaatgataaaggggatatcaccactgatcccacagaaatacaaactaccatcagagaatactacaaacacctctacgcaaataaactagaaaatctagaagaaatggataaattcctcgacacgtacaccctcccaagactaaaccaggaagaagttgaatctctgaataaaccaataacaggctctgaaattgtggcaataattaatagcttaccaaccaaaaagagtccaggaccagatggattcacagccgaattctaccagaagtacaaggaggaactggtaccattccttctgaaactattccaatcaatagaaaaagagggaatcctccctaactcatttgctgaggccagcatcattctgataccaaagccaggcagagacacaaccaaaaaagagaattttagaccaatatccttgatgaacattgatgcaaaaatcctcaataaaatactggcaaaccaaatccagcagcacatcaaaaaggttatccacgatgattaagtgggcttcatccctgggatgcaaggctggttcaatatatgcaaatcaataaatgtaatccagcatataaacagaaccaaagacaaaaaccacatgattatctcaatagatgcagaaaaggcctttgacaaaattcaacaacgcttcatgctaaaaactctcaataaattaggtattgatgggatgtatctcaaaataataagagctatctatgacaaacccacagccaatatcatactgaatggacgaaaactggaagcattccctttgaaaactggcacaagaaagggatgccctctctcatcactcctattcaatatagtgttggaagttctggccaggtcaatcaggcaggagaaggaaataaagggcattcaattaggaaaagaggaagtcaaattgtccctgtttgcaggtgacatgattgtatatctagaaaaccccattgtctcagcccaaaatctccttaagctgacaagcaacttcagcaaagtctcaggatacaaaatcaatgtacaaaaatcacaagcattcttatacacaaataacagacaaacagagagccaaatcatgagtgaactcccattcacaattgcttcaaagagaataaaatacctaggaatccaacttacaagggatgtgaaggacctcttcaaggagaactacaaaccactgctcaatgaaataaagaggatacaaacaaatagaagaacattccatgctcatgggtaggaagaatcaatatcatgaaaatggccgtactgcccaaggtaatttatagattcaatgccatccccatcaagctaccaatgattttcttcacagaattggaaaaaactactttaaagttcatatggaaccaaaaaacagcccgcatcgccaagtcaatcctaagccaaaagaacaaagctggaggcatcatgctacctgacttcaaactatactacaaggctacagtaaccaaaacagcatggtactggtaccaaaacagagatatagatcaatggaacagaacagagccctcagaaataacgctgcatatctatagctatctgatctttgacaaacctgagaaaaacaagcaatggggaaaggattccctatttaataaatggtgctgggaaaactggccagccatatgtagaaagctgaaactggatcccttccttacaccttatacaaaaattaattcaagatggattaaagacttaaacgttagacataaaaccataaaaaccctagaagaaaacctaagcattaccattcaggtcataggcatgggcaaggacttcatgtctaaaacaccaaaagcaatggcaacaaaagacaaaattgacaaatgggatctaattaaactaaagagcttctgcacagcaaaagaaactaccatcagagtgaacaggcaacctacaaaatgggagaaaattttcgcaacctactcatctgacaaagggctaatatccagaatctacaatgaactccaacaaatttacaagaaaaaaacaaacaaccccatccaaaagtgggcaagggacatgaacagacacttctcaacagaagacatttatgcagccaaaaaacacatgaaaaaatgctcaccatcactggccataagagaaatgcaaaccaaaaccacaatgagatactatctcacaccagttagaatggcaatcattaaaaagtcaggaaacaacaggtgctggagaggatgtggagaaataggaatgcttttacattgttggcgcaagtataaattagttcaaccattgtggaagacagtgtggccattcctcaaggatctagaactagaaataccatttgacccagccatcccagtacggggtatatacccaaaggactataaatcctgctgctataaaaacacatgcacacgtatgtttattgcagcactcttcacaatagcaaagacttggaaccaacccaaatgtccagcaatgatagactggattaagaaaatgtggcatatatacaccatggaatactatgcagccataaaaaatgatgagttcatgtcctttgtagggacatggatgaaattggaaatcatcattctcagtaaactatcgcaagaacaaaaaaccaagcactgcatattctcactcataggtgggaattgaacaatgagaacacatggacacaggaaggggaacatcacactctgtggactgttgtggggtgggggaaggggggatggaaagcat

SEQ ID NO: 618 - DNA, 7384 bp, Homo sapiens
gaaaaaaatttagacgaatgtataactagaataaccaatacagagaagtgcttaaaggagctgatggagctgaaagccaaggctcgagaactacgtgaagaatgcagaagcctcaggagccgatgcaaccaactggaagaaagggtatcagtgatggaagatgaaatgaatgaaatgaagcgagaagggaagtttacagaaaaaagaataaaaagaaatgaacaaagcatccaagaaatatgggactatgtgaaaagaccaaatctatgtctgattggcctacctgaaagtgacggggagaatagaaccaagttggaaaacactctgcaggatattataaaggagaacttccccaatctagcaaggcaggccaacattcagattcaggaaatacagagaacgccacaaagatactcctcgagaagagcaactccaacacacataattgtcagatttgccaaagttgaaatgaaggaaaaaatgttaagggcagccagagagaaaggtcgggttacccacaaagggaagcccatcagactaacagtggatctctcggcagaaactctacaagccagaagagagtgggggccaatattcaacattcctaaagaaaagaattttcaacccagattttcatatccagccaaactaagcctcataagtgaaggagaaataaaatactttacagacaagcaaatgctgagagattttgttaccaccaggcctgctctaaaagagctcctgaaggaagcactaaacgcggaaagcaacaaccggtaccagccactgcaaaatcatgccaaattgtaaagaccatcgaggccaggaagaaactgcatcaactaatgagcaaaataaccagctaatatcataatgacaggatcaaattcacacataacaatattaactttaaatgtaaatggactaaatgctccaattaaaagacacagactggcaaattggataaagagtcaagacccatcagtgtgctgtattcaggaaacccatctcacgtgcagagacacatataggctcaaaataaaaggatggaggaagatctaccaagcaaatggaaaacaaaaaatggcaggggttgcaatcctagcctctgataaaacagactttaaaccaacaaagatcaaaagacacaaagaaggccattacataatggtaaagggatcaattcaacaagaagagctaactatcctaaatatatatacacccaatacaggagcacccaggttcataaagcaagtcctgagtgacctacaaagacacttagactcccacacaataataatgggagactttaacaccccactgtcaacattagacagatcaacgagacagaaatttaacaaggatacccaggaattgaactcagctctacaccaagcagacctaatagacatctacagaactctccaccccaaatcaacagaatatacatttttttcagcaccacaccacacctattccaaaattgaccacatacttggaagtaaagctctcctcagcaaatgtaaaagatcagaaattacaacaaactgtctctcagaccacagtgcaatcaaactagaactcaggattaagaaactcactcaaaaccgctcaactacatgcaaactgaacaacctgctactaaatgactactggctacataacggaatgaagacagaaataaagatgatctttgaaaccaacgagaacaaagacacaacataccagaatctctgggacacattcaaagcagtgtgtagagagaaatttatagcattaaatgccctcaagagaaagcacgaaagatccaaaattgacaccctaacatcacaattacaagaactagaaaagcaagagcaaacacattcaaaagctagcagaaggcaaggaataactaaaatcagagcagaactgaaggaaatagagacacaaaaaacccttcaaaaaattaatgaatctaggagctggttttttgaaaggatcaacaaaattgatagaccgctaccaagactaataaagaaaaaagagagaagaatcaaatagacgcaataaaaaatgataaaggggatatcaccactgatcccacagaaatacaaactaccatcagagaatactacaaacacctctacgcaaataaactagaaaatctagaagaaatggataaattcctcgacacgtacaccctcccaagactaaaccaggaagaagttgaatctctgaataaaccaataacaggctctgaaattgtggcaataattaatagcttaccaaccaaaaagagtccaggaccagatggattcacagccgaattctaccagaagtacaaggaggaactggtaccattccttctgaaactattccaatcaatagaaaaagagggaatcctccctaactcatttgctgaggccagcatcattctgataccaaagccaggcagagacacaaccaaaaaagagaattttagaccaatatccttgatgaacattgatgcaaaaatcctcaataaaatactggcaaaccaaatccagcagcacatcaaaaaggttatccacgatgattaagtgggcttcatccctgggatgcaaggctggttcaatatatgcaaatcaataaatgtaatccagcatataaacagaaccaaagacaaaaaccacatgattatctcaatagatgcagaaaaggcctttgacaaaattcaacaacgcttcatgctaaaaactctcaataaattaggtattgatgggatgtatctcaaaataataagagctatctatgacaaacccacagccaatatcatactgaatggacgaaaactggaagcattccctttgaaaactggcacaagaaagggatgccctctctcatcactcctattcaatatagtgttggaagttctggccaggtcaatcaggcaggagaaggaaataaagggcattcaattaggaaaagaggaagtcaaattgtccctgtttgcaggtgacatgattgtatatctagaaaaccccattgtctcagcccaaaatctccttaagctgacaagcaacttcagcaaagtctcaggatacaaaatcaatgtacaaaaatcacaagcattcttatacacaaataacagacaaacagagagccaaatcatgagtgaactcccattcacaattgcttcaaagagaataaaatacctaggaatccaacttacaagggatgtgaaggacctcttcaaggagaactacaaaccactgctcaatgaaataaagaggatacaaacaaatagaagaacattccatgctcatgggtaggaagaatcaatatcatgaaaatggccgtactgcccaaggtaatttatagattcaatgccatccccatcaagctaccaatgattttcttcacagaattggaaaaaactactttaaagttcatatggaaccaaaaaacagcccgcatcgccaagtcaatcctaagccaaaagaacaaagctggaggcatcatgctacctgacttcaaactatactacaaggctacagtaaccaaaacagcatggtactggtaccaaaacagagatatagatcaatggaacagaacagagccctcagaaataacgctgcatatctatagctatctgatctttgacaaacctgagaaaaacaagcaatggggaaaggattccctatttaataaatggtgctgggaaaactggccagccatatgtagaaagctgaaactggatcccttccttacaccttatacaaaaattaattcaagatggattaaagacttaaacgttagacataaaaccataaaaaccctagaagaaaacctaagcattaccattcaggtcataggcatgggcaaggacttcatgtctaaaacaccaaaagcaatggcaacaaaagacaaaattgacaaatgggatctaattaaactaaagagcttctgcacagcaaaagaaactaccatcagagtgaacaggcaacctacaaaatgggagaaaattttcgcaacctactcatctgacaaagggctaatatccagaatctacaatgaactccaacaaatttacaagaaaaaaacaaacaaccccatccaaaagtgggcaagggacatgaacagacacttctcaacagaagacatttatgcagccaaaaaacacatgaaaaaatgctcaccatcactggccataagagaaatgcaaaccaaaaccacaatgagatactatctcacaccagttagaatggcaatcattaaaaagtcaggaaacaacaggtgctggagaggatgtggagaaataggaatgcttttacattgttggcgcaagtataaattagttcaaccattgtggaagacagtgtggccattcctcaaggatctagaactagaaataccatttgacccagccatcccagtacggggtatatacccaaaggactataaatcctgctgctataaaaacacatgcacacgtatgtttattgcagcactcttcacaatagcaaagacttggaaccaacccaaatgtccagcaatgatagactggattaagaaaatgtggcatatatacaccatggaatactatgcagccataaaaaatgatgagttcatgtcctttgtagggacatggatgaaattggaaatcatcattctcagtaaactatcgcaagaacaaaaaaccaagcactgcatattctcactcataggtgggaattgaacaatgagaacacatggacacaggaaggggaacatcacactctgtggactgttgtggggtgggggaaggggggagggatagcattaggagatatacctaatgctaaatgacaagttaatgggtgcagcacaccagcatggcacatgtatacatatgtgactaacctgcacattgtgcacatgtaccctaaaacttaaagcataataataataaaataaaataaaaagactttaaactttacttctaaaaaaaaaaataaagagagtcaactttccttcacattgtttacatgtaaatgtgtctggtattttcagtttaaacagtgggagaaaggcactgtccctcaacaagactcataaagtgaaaaggtccccaaatatataaaggaatttcaaatcagatgtatggaagttaaaaacaacaacaaattcagaggtagaatgatagacattttgtagttaaaaattatgtttggagtaattctgacctgagttcacgggttaagcaaagtactcaatcttgctgatcctcaatgtcctctgaaaaaaaaacttggaagataatatctatataaaatagtgtagtatagattaaatgaattatatatacaaagtgcttaggacatcctaagcattttattaaactgtttattattattattattattattattgttactgaccagttaaattactgcaagaattaacagagtaatgatatatgtaacacagtgctaaacatcacatttaccatctcgcctaagcaggtgttcattcaacaaatattctatatatcagacaataattcattagtatttttttacagaaaaaaaatcatgaggaatatgaagcataaacaatggaccagaagtcactcaattaagacataatggaagtgagattccaacccagaattattgagcttgagaaactatactgttttcttttactattattatactttaagttctaaggtacatgtgcacaatatgcaagtttgttacataggtatacatgtgccatgttagtttgctacacccatcaactcatcatttacattaggtatttctcctaacgctatccctaccccagcccctcactcccaaacaggccccggtgtgtgggtgtgtgatgctcccctccctgtgtccatgtgttatcattgttcagctcccacttatggtgacaacatgcgggactacactcttaaccataacaatgtagtacccttcagatcgaatgtacaacatggtgactatagttaataatacagcactggttacttgaaatttgccaagagagaaaatcttagtgtcctcaccatacacacacacacacccacacacacacacacacaatggtaactatgtgtggcaatagatgtgctaattatttagattgtggtaaacattccacaatgtatacatatatcaaatcatcttgtggtacatgttgaatatatacaaattttaactgtcaattatatgtcagtaaagctgaaaagaaactcaaactaacttgaaaacaaaatatagcatccatcaatatgttaataattataaaatacttaatagactggagaccttcaataagtgatatttcttgtaactattattagttattaattgtgtggcactgtttacttgtaatgacaaggatgtaagatgaggttgctgctacaaaacttcagagcccctgcgggcatttgtggggtaaacacagaaggaaatgaggtctctcaatttccaacacagaaactctttaagttggttggtcttcataatacctcccttataataagaaaataatgcttttcctacatttgcaccggacatgggaataaatccatatttctgggtgtgtggtaggaggcaggactaggctttgggggtcgggcttggatacctgaccaaatgatggactagctcaaacaggtcagggtggaaacacctccgcataagacactcccaccaatgtgccatcttggtttatcattgccatggcaatacccataaattactgccctttttcacggcaacaacctggacaacccggaagttacaaccttcatcctagaaatttctgcataagttgccccttaatttgcatataattaaaagtgggtctaagtatgactgcagaactccctctaagctacctaagctgggcacgctgcctagggggtagccctgctctgcaagaagcagtacctctgcggctgctgtaggctactgcttcaataaaagtcgttgtttaacaccactggcttgcctttgaaattgtttcgtgggtgaagctaagaaccctctcgggctaagcctcaatttgggggtctgcctgtcgtgcatcaggtgtgtatagaaccttcacttaaattctcatctgctcagacttattatactaagaatgctttatttcattaatgcaaattttccagggatagaaataatgtatatatgtggagtattggaagagttcaagaacatcaccactcatcattctgcagtccttaaaggcatgtgttatttctacctcacatgaagaaaactgtgtctggccgggcgcggtggctcacgcctgtaatcccagcactttgggaggccgaggtgggtggatcacgaggtcaggagtttgagaccagcctggataacatggtgaaaccctgtctctacttaaaatacaaaaa

SEQ ID NO: 619 - DNA, 7380 bp, Homo sapiens
gaaaaaaatttagacgaatgtataactagaataaccaatacagagaagtgcttaaaggagctgatggagctgaaagccaaggctcgagaactacgtgaagaatgcagaagcctcaggagccgatgcaaccaactggaagaaagggtatcagtgatggaagatgaaatgaatgaaatgaagcgagaagggaagtttacagaaaaaagaataaaaagaaatgaacaaagcatccaagaaatatgggactatgtgaaaagaccaaatctatgtctgattggcctacctgaaagtgacggggagaatagaaccaagttggaaaacactctgcaggatattataaaggagaacttccccaatctagcaaggcaggccaacattcagattcaggaaatacagagaacgccacaaagatactcctcgagaagagcaactccaacacacataattgtcagatttgccaaagttgaaatgaaggaaaaaatgttaagggcagccagagagaaaggtcgggttacccacaaagggaagcccatcagactaacagtggatctctcggcagaaactctacaagccagaagagagtgggggccaatattcaacattcctaaagaaaagaattttcaacccagattttcatatccagccaaactaagcctcataagtgaaggagaaataaaatactttacagacaagcaaatgctgagagattttgttaccaccaggcctgctctaaaagagctcctgaaggaagcactaaacgcggaaagcaacaaccggtaccagccactgcaaaatcatgccaaattgtaaagaccatcgaggccaggaagaaactgcatcaactaatgagcaaaataaccagctaatatcataatgacaggatcaaattcacacataacaatattaactttaaatgtaaatggactaaatgctccaattaaaagacacagactggcaaattggataaagagtcaagacccatcagtgtgctgtattcaggaaacccatctcacgtgcagagacacatataggctcaaaataaaaggatggaggaagatctaccaagcaaatggaaaacaaaaaatggcaggggttgcaatcctagcctctgataaaacagactttaaaccaacaaagatcaaaagacacaaagaaggccattacataatggtaaagggatcaattcaataagaagagctaactatcctaaatatatatacacccaatacaggagcacccaggttcataaagcaagtcctgagtgacctacaaagacacttagactcccacacaataataatgggagactttaacaccccactgtcaacattagacagatcaacgagacagaaatttaacaaggatacccaggaattgaactcagctctacaccaagcagacctaatagacatctacagaactctccaccccaaatcaacagaatatacatttttttcagcaccacaccacacctattccaaaattgaccacatacttggaagtaaagctctcctcagcaaatgtaaaagatcagaaattacaacaaactgtctctcagaccacagtgcaatcaaactagaactcaggattaagaaactcactcaaaaccgctcaactacatgcaaactgaacaacctgctactaaatgactactggctacataacggaatgaagacagaaataaagatgatctttgaaaccaacgagaacaaagacacaacataccagaatctctgggacacattcaaagcagtgtgtagagagaaatttatagcattaaatgccctcaagagaaagcacgaaagatccaaaattgacaccctaacatcacaattacaagaactagaaaagcaagagcaaacacattcaaaagctagcagaaggcaaggaataactaaaatcagagcagaactgaaggaaatagagacacaaaaaacccttcaaaaaattaatgaatctaggagctggttttttgaaaggatcaacaaaattgatagaccgctaccaagactaataaagaaaaaagagagaagaatcaaatagacgcaataaaaaatgataaaggggatatcaccactgatcccacagaaatacaaactaccatcagagaatactacaaacacctctacgcaaataaactagaaaatctagaagaaatggataaattcctcgacacgtacaccctcccaagactaaaccaggaagaagttgaatctctgaataaaccaataacaggctctgaaattgtggcaataattaatagcttaccaaccaaaaagagtccaggaccagatggattcacagccgaattctaccagaagtacaaggaggaactggtaccattccttctgaaactattccaatcaatagaaaaagagggaatcctccctaactcatttgctgaggccagcatcattctgataccaaagccaggcagagacacaaccaaaaaagagaattttagaccaatatccttgatgaacattgatgcaaaaatcctcaataaaatactggcaaaccaaatccagcagcacatcaaaaaggttatccacgatgattaagtgggcttcatccctgggatgcaaggctggttcaatatatgcaaatcaataaatgtaatccagcatataaacagaaccaaagacaaaaaccacatgattatctcaatagatgcagaaaaggcctttgacaaaattcaacaacgcttcatgctaaaaactctcaataaattaggtattgatgggatgtatctcaaaataataagagctatctatgacaaacccacagccaatatcatactgaatggacgaaaactggaagcattccctttgaaaactggcacaagaaagggatgccctctctcatcactcctattcaatatagtgttggaagttctggccaggtcaatcaggcaggagaaggaaataaagggcattcaattaggaaaagaggaagtcaaattgtccctgtttgcaggtgacatgattgtatatctagaaaaccccattgtctcagcccaaaatctccttaagctgacaagcaacttcagcaaagtctcaggatacaaaatcaatgtacaaaaatcacaagcattcttatacacaaataacagacaaacagagagccaaatcatgagtgaactcccattcacaattgcttcaaagagaataaaatacctaggaatccaacttacaagggatgtgaaggacctcttcaaggagaactacaaaccactgctcaatgaaataaagaggatacaaacaaatagaagaacattccatgctcatgggtaggaagaatcaatatcatgaaaatggccgtactgcccaaggtaatttatagattcaatgccatccccatcaagctaccaatgattttcttcacagaattggaaaaaactactttaaagttcatatggaaccaaaaaacagcccgcatcgccaagtcaatcctaagccaaaagaacaaagctggaggcatcatgctacctgacttcaaactatactacaaggctacagtaaccaaaacagcatggtactggtaccaaaacagagatatagatcaatggaacagaacagagccctcagaaataacgctgcatatctatagctatctgatctttgacaaacctgagaaaaacaagcaatggggaaaggattccctatttaataaatggtgctgggaaaactggccagccatatgtagaaagctgaaactggatcccttccttacaccttatacaaaaattaattcaagatggattaaagacttaaacgttagacataaaaccataaaaaccctagaagaaaacctaagcattaccattcaggtcataggcatgggcaaggacttcatgtctaaaacaccaaaagcaatggcaacaaaagacaaaattgacaaatgggatctaattaaactaaagagcttctgcacagcaaaagaaactaccatcagagtgaacaggcaacctacaaaatgggagaaaattttcgcaacctactcatctgacaaagggctaatatccagaatctacaatgaactccaacaaatttacaagaaaaaaacaaacaaccccatccaaaagtgggcaagggacatgaacagacacttctcaacagaagacatttatgcagccaaaaaacacatgaaaaaatgctcaccatcactggccataagagaaatgcaaaccaaaaccacaatgagatactatctcacaccagttagaatggcaatcattaaaaagtcaggaaacaacaggtgctggagaggatgtggagaaataggaatgcttttacattgttggcgcaagtataaattagttcaaccattgtggaagacagtgtggccattcctcaaggatctagaactagaaataccatttgacccagccatcccagtacggggtatatacccaaaggactataaatcctgctgctataaaaacacatgcacacgtatgtttattgcagcactcttcacaatagcaaagacttggaaccaacccaaatgtccagcaatgatagactggattaagaaaatgtggcatatatacaccatggaatactatgcagccataaaaaatgatgagttcatgtcctttgtagggacatggatgaaattggaaatcatcattctcagtaaactatcgcaagaacaaaaaaccaagcactgcatattctcactcataggtgggaattgaacaatgagaacacatggacacaggaaggggaacatcacactctgtggactgttgtggggtgggggaaggggggagggatagcattaggagatatacctaatgctaaatgacaagttaatgggtgcagcacaccagcatggcacatgtatacatatgtgactaacctgcacattgtgcacatgtaccctaaaacttaaagcataataataataaaataaaataaaaagactttaaactttacttctaaaaaaaaaaataaagagagtcaactttccttcacattgtttacatgtaaatgtgtctggtattttcagtttaaacagtgggagaaaggcactgtccctcaacaagactcataaagtgaaaaggtccccaaatatataaaggaatttcaaatcagatgtatggaagttaaaaacaacaacaaattcagaggtagaatgatagacattttgtagttaaaaattatgtttggagtaattctgacctgagttcacgggttaagcaaagtactcaatcttgctgatcctcaatgtcctctgaaaaaaaaacttggaagataatatctatataaaatagtgtagtatagattaaatgaattatatatacaaagtgcttaggacatcctaagcattttattaaactgtttattattattattattattattattgttactgaccagttaaattactgcaagaattaacagagtaatgatatatgtaacacagtgctaaacatcacatttaccatctcgcctaagcaggtgttcattcaacaaatattctatatatcagacaataattcattagtatttttttacagaaaaaaaatcatgaggaatatgaagcataaacaatggaccagaagtcactcaattaagacataatggaagtgagattccaacccagaattattgagcttgagaaactatactgttttcttttactattattatactttaagttctaaggtacatgtgcacaatatgcaagtttgttacataggtatacatgtgccatgttagtttgctacacccatcaactcatcatttacattaggtatttctcctaacgctatccctaccccagcccctcactcccaaacaggccccggtgtgtgggtgtgtgatgctcccctccctgtgtccatgtgttatcattgttcagctcccacttatggtgacaacatgcgggactacactcttaaccataacaatgtagtacccttcagatcgaatgtacaacatggtgactatagttaataatacagcactggttacttgaaatttgccaagagagaaaatcttagtgtcctcaccatacacacacacacacccacacacacacacaatggtaactatgtgtggcaatagatgtgctaattatttagattgtggtaaacattccacaatgtatacatatatcaaatcatcttgtggtacatgttgaatatatacaaattttaactgtcaattatatgtcagtaaagctgaaaagaaactcaaactaacttgaaaacaaaatatagcatccatcaatatgttaataattataaaatacttaatagactggagaccttcaataagtgatatttcttgtaactattattagttattaattgtgtggcactgtttacttgtaatgacaaggatgtaagatgaggttgctgctacaaaacttcagagcccctgcgggcatttgtggggtaaacacagaaggaaatgaggtctctcaatttccaacacagaaactctttaagttggttggtcttcataatacctcccttataataagaaaataatgcttttcctacatttgcaccggacatgggaataaatccatatttctgggtgtgtggtaggaggcaggactaggctttgggggtcgggcttggatacctgaccaaatgatggactagctcaaacaggtcagggtggaaacacctccgcataagacactcccaccaatgtgccatcttggtttatcattgccatggcaatacccataaattactgccctttttcacggcaacaacctggacaacccggaagttacaaccttcatcctagaaatttctgcataagttgccccttaatttgcatataattaaaagtgggtctaagtatgactgcagaactccctctaagctacctaagctgggcacgctgcctagggggtagccctgctctgcaagaagcagtacctctgcggctgctgtaggctactgcttcaataaaagtcgttgtttaacaccactggcttgcctttgaaattgtttcgtgggtgaagctaagaaccctctcgggctaagcctcaatttgggggtctgcctgtcgtgcatcaggtgtgtatagaaccttcacttaaattctcatctgctcagacttattatactaagaatgctttatttcattaatgcaaattttccagggatagaaataatgtatatatgtggagtattggaagagttcaagaacatcaccactcatcattctgcagtccttaaaggcatgtgttatttctacctcacatgaagaaaactgtgtctggccgggcgcggtggctcacgcctgtaatcccagcactttgggaggccgaggtgggtggatcacgaggtcaggagtttgagaccagcctggataacatggtgaaaccctgtctctacttaaaatacaaaaa

SEQ ID NO: 620 - DNA, 559 bp, Homo sapiens
atataaatcactgaaaaacctcatacagctgtttaaatatttctaaaaattcaccgaaggccaaaggtattcctaagtacttgatgaagtattattagaaacattaataaatatttcaatgtcctaagacatctcttgacacagatggagaaatcagagattcaaggcagaccgctgatccattaatcactcattatgtcatgccctcttctttgcgtaaattgctgggacagggtggccagactcattttgtagatggagcaacttgaaacacagggtaatagttcacgatttgcctgaatcttattcaaaagttgtgactgagtttctaactgctataatagttatatatagcaagttatataaagcaagaaagaccttgctaatttttagaaaaccagtgctttaaaactgcaaaattgccatgcagtagcaaagaaaataaaattttatataatttctatgttaaactggggaccttttctattcaatcagtgaaactgaagcatatataattttaacgaaaaaaacccacgtgaaataaaatgtcaatttcaca

SEQ ID NO: 621 - DNA, 13392 bp, Homo sapiens
ctggcagagatcagcatgtattgaggtcagctggtttgtattcatctgcatcttgtctatggcttgcttaaggatgccaattcctcgcaggggctgtcagaaatgacatctctttcagataagttctcaaagatggcagcacattggatcttatgttgtcacttataaataaaaaataacactaattgataggttcctttaaatagcaatatgaggtttccatactctttcaggaaatttctgtcccatttaagtcagaaaacttttcttaagctgtttcttggaatttttagataactcagcaccattttttaaatcataaaaagcttttatttttacaatgaagatcaataatcaaaaacagtattactttctcaacagtttattatattaacatctaaacaaatgaaaactttccaaatcacttattatacaagagacaacagcctatgcttaggaaaattacttgtggctaagggtgttggcattttcccatagggcagtctaccccttacctggtagtaaattactaccaaaactaacaccatagatttcaaaaggactgtttcctgccctgattataaataagaagaccaagtgtcaagtaaggcataatcagtttttggcagactaaaatatagtctcttccaaaattgctgggcacggtggctcacacctgtaatcccagcattttgggaggccaagatgggtggatcatgaggtcaggagatcaagattatcctggccaacatggcaaaaccccatgtctactaaaaatacaaaaattagccgggcatggtgggatgtgcctgtggtcccagctactcaggaggctgaggcaggagaatcgcttgaacccgggaggcggaggttgcagtgagctgagatcgcgccactgcactccagcctgggcaacagagcaagaccccatctcaaaaaaacaacaacaacaacaacaacaacaaaaatatatatatatatatgtgaagagactaaaaatagctcaataacttacagctttttcaaaaactcatgatttttcttaaccatctctttcaaacatggttacttagtactacaaaataacaactggttctattttcagcctctttcaaaccactaatcttaaatttactttcaaattaaaaagaaacacctggctgggtgaagtggctcacacctgtaatctcagccctttgggaggctgaagcaggcggatcaccagaggtcaggagttctagaggctagcctggccaacatggcaaaacctcacctctattaaaaatacaaaaatcactgggaggccgaggcaggcggatcgcctgtggtcaggagtttgacaccagcctggcaaacatggtgaaaccctgtctctactaaaaatacaaaaattagccgggcatggtgtcaggcacctgtaatcccagctacttgggaggctgaggcagaagaactgcttgaacccaggaggcggaagttgcagtgagccgagattgcgccattgcactccagcctgggtgacagagcgagactctgtctcaaaaaacaaaacaaaacaaaaatcagctgggaaaggtgacatgcgcctgtagtcccagctactcaggaggctgaggcacgagaatcgcctgaagctggaaggtggaggttgcagtgagctgagatcacaccactgcactccagcctaggcaacagaatgagactccatttcaaaaaaataaataactaaataaattttttaaaaatccacattataaattatgtattataaaagataaagaatgaaataactgttcagattaagggacactaaagaaacaaagcagtctaatgcaatccatggtccacggttttcttttgctatataatatatagtacactgtccaaacagctaatgtccttttatagcaaaagacagtccttttcactgggggaaaatctaaatggggtctgtcaatttgttgatgcattatattaacgttcatttctgggccgggcgtggtggctcacgcctgtaatcctggcactttgggaggccaaggcgggaggattgcctgagctcaggagttcgagaccagcctggcaacatggtgaaaccccgtctctactaaaatacaaaaaattagctgggcgtggcagcatgcacctgtagtccccagctactcaggaggctgaggcagaagaattgcttgaacctgggaggtggaggttgcagtgaccagagatggcgccactgcactccagcctaggcatcagagcgagactctgtctccaaaaaaaaaaacagtaagagttcatttctggatgctgaccattacactatactatgtaacagaatgtcctaatttttaggctttacccactgaagtatttagggataaagaacagcaatagcatatgtgcaacttactctacaatggctcagaataaaagaggaagagaaaaaaaaaagaataagtgcggtaaaatgttaacatttggaaaatctaggtaaaatgtatgagaattttttatattatttttgaagctttttgtaaggctaaaataatgtcctaattaaaagttaaaagaaaaaatgtaacagacaaaacccagcatattacaacataaagggtactggcttggtaattccaactacttggtagttccagcagcagcctccctgaggtgccaaaccaccccgtgcctccacctcattcaggggatgcggggactgcctgagcttacagcaatggctgtgagtgctctcaagtgaccacagatgtctaggtggtggatgctcagtactaactggaatcttgataaagtaattcattgtgtaagctagttacatattataacaaaactaggaatacttgaatagtatttcttacctgttttctttccacaagtgcatttgttagctgatggcaaagcccagcaactagatacaataacaaaatattcaaaatataaatataaccacaagggcaaaatattttcaatggagaataaaatgttatttagcttacaagtgtctgttgcatatcgaatgtgctccccattacaagtgctgatgaagagctgaacctgtgagaatagcgtttcgaagtcaggaacactgggcatagaaaacttcacaaacctagaataaggagaaaagaatcaaattaccctgatagttcatgggataaaatacagaaacaatgtatgcaagaaatccatcctgcctccaatactctgtaaaattaaatgagcaacagtattttttagaattaagaactaggccaggacagtggctcatgcccgtaatccaagcactttgggaggctgaggcaggaggactgcttaaggccaggagtttgagaccagtctgagcaacatggtgagaccctgtctctactacaaaaaataaattagccaggcgtgggggtacatgcctgtagttgcagatacttgggaggctgaggctggaggatcacttgtgcctagaaggttgaggctgcagtgagctatgatcatgccactgcactccagcctgggtgacagagcaagatccagtctcaaaaaacaaataaataagaactagaatccatgagattttcctgacctggttattttgcacaatcactatacagaacggacacaaataagggttaagaaaaatatgtttaggcctggcgcagtggctcatgcctgtaatcccagcaccttgggaggccaaggcgggaggatcacctaaggtcgggagttcgagaccagcctgatcaacatggaaaaacctcgtctctactaaaaatacaaaaaaattagccgggcgtggtggtgcatgcatgcctgtaaccccagctactcgggaggctgaggaactgcttgaacccgggaggtggaggttgcagtgagctgagatggtgccactgcactccagcctgggcaacaagagcgagactgtctcaaaaaaaaaatctatatatatctatatatatatatatatacacacatacacacacatatgtttaataatatatattaaataataaacatgtatatattaaacatatatgttttatatatatatatatgtttaataaggaacaactttcaagatgaaaaattccactaaatgaagccaaataggctgggcatggtggctcaagcctgtaatcccagcactacggaaggccaaggtgggcagatgggcagatcacaaggtcaggagttcgagaccagcctagccaatatggtgaaaacccatgtctgctaaaaatacaaaaattggccaggcacggtggctcacgcctataatcccagcactttgggaggccaaggcgggtggatcacctgaggtcaggatttcaagaccagcctgaccaatcgggtgaaaccccatctctacaaaaaatagaaaaattagccgggcgtggtggcaggtgcctgtaatcccacctatttgggaggctgagacaggagaattgcttgaacccaggaggcagagtttgcagtgagctgagatcgtgccactgcactccagcccgggtgacggagtgagactcgtctcaaaaaaaaaaactcctttatgtttatacaaatcctgaaaatttgttttaaaaaatggccatctcaattgtggggactatagtttgcatttatctgaatacttttatccatgtaatccacaggaatgtccacattttctaaattaaaaagaagttcggaggagtactgccacagggcatggcagaatacattgaatgaaaatattggctgggcacagttgctcataatcccaacactttgggaggccaaggtcggaggatcatttgaggccaggagtttgagaccagcctaggcaacataatatggccctatctctgcaaagaataaaaatattagctgggtgtagtggtacatgcctatagtcctagcttctcaagatgctgaggtgggaggattgcttgagcccagaagttcaaggcttcagtaagctacaattaagccattgcactccagcctacatgacaaagtgagaccttttctcaaaaaaagaaaaagtatcaaagatccaaagcaacattgcttagaattcccttcaaacaaatttaagctatttaagaccaaattaaatagaccttattttaattggggttccttgtaaccgtgtacttgacagtagaattctttttctcttgatgttatagtattataaattgggatattgtggttgtcatgacatttgaaatgatataaataaactgagaagaaattgacttaaagtgagagtctggcttcacttacgctgggattcctgagacaaaggtatgtgtccggagcagagtttagagaagaagctttgtcagaatggaaggatctagagttatgctctgcagtatggtggccactagccatatgcagctatttaaattaaaattaaagattcaggtgcacttgccatgtttcaagtactcagtagccacatgtggtcacatgtccttgtcttagcacaggtttgtaacatttccaccactgcagatagttctattggacagtgctggtaaggatttctactgtctgtattttcttatttatatgaaagagcagatgctgggcacagtggctcacacctgtaatcctagcactttgggaggctctgtttgagaccagcctgggaaacatagcaagaccccatctctacagaaaaaaaaagtggccaggtatggtggcttatgcctgtaatcccaggactttgggaggctgagatgggcagattgcttgagctcaggagttcaagaccagcctgggaaacgtgatgaaaccctgtctttacaaaaaaacacaaaaattaggcgggcgtggtggtgtacacctgtggtcctggctactcaggaggctgaggttggaagatcacttgagtccatgagattgaagctgcagtgagctgtgctcatgccactgcactcctgactgggtgacagaacaagaccttgtccccccaaaagaaaaaaagttagctgagtgtggtggcacatgcctgtggtcccagctacccaggaggctaaagtgggaggactgcttgagcctgggaggtcgaggctacagtgagctatgcttgcaccactgcacttcagcctgagtgacatcaagaccctatctcaagaaagaacagagagcatgcatgttttatacacacataaactcacataaacatatatatcaggtgagtaatggacatgaatgcattttgaaggtataaggtgtttaccgttgtatatgttagataaggtatggaaagaaccctgagcttctggctgaggaccctggttttgaatctacatattcttccaattttgagttgtggggccctgagcttcatatttttatttataaactggcagtcgcaatgcctcactgacctattgtgaaccccagatgaaattgtttctgacatgtcttgataattacaaagtgtaaatacagatgtatggtgacattgttaagtcaaataatacagtatagatggaagcagataaaccaaaagatgtagtagaaattatgattagcttttcttttttttttttttgagacagagtctcacactctgtcacccagactggagtgcagtggcgttgtctcagctcactgcaacctccgcctcccaggttcaagccattctcctgcctcagcctcccgagtagctgggactacaggtgcatgccaccacacccggctaatttttgtatttttagtagagacagggtctcactatgttggccaggctggtcttgaactcctgaacttgtgatccacccgccttggcctcccaaagtgccgggattacagatgtaagccactgtgtctggcctaatttttcttgaaattacatttcaatcgtgcttttttttttttttaaagaatttgaaatttacttacaaccaatgccttaatagtgctaagtttacatgatttctcccctaaaacctatcaccagtgcctccttggagtgtttctcatggcagtctgagttacttgggaaggatcacctgagtcctccctcttctcaccactctactcctcttgtcctgcctatcagttgttctgtcagtgttattctcagatagaccacacagctggtggcagcatctttaacttaagctgctgcccacctccagccagcccatagctctcactcttggcccccttagtatgttctcaaagcaggaaaagcaacaactgattttttttttttttttgagagagtctccctctgtcgcccaggctggagtgcagtggtgcaatcttggctcactgcaacctctgccttccaggctcaagcaattctcatgcctcagccacctgagtagctgggactacaggcatgcgccaacacacccggctagtttttttattagtagagacagggtttcaccagttggccaggcaggtctggagctcctggccccaagtgatccacctgcctctgcctcccaaaatgttgggattagaggcgggagccactgtgcccagctgcaacaactgattttatttttttgagacagtctcgctctgtcacccaggctagagtacagtggcgcgaccttggctcactgcaacctctttatgcccggatacataaaagagtttttaaaaatgataaagttgaacaaaatataacaagcaattattagctggaatcaataaactgtaactgccataactttagttttgcaaaagagctcaatgttatttacaatggtttactttctacaccaaaaaataaataaataaataaaaataaagccagggctgggcgtggtggctcacgcctgtaatcccagcattttgggaggccaaggtgggcggaccaagaggtcaggagatcgagatcatcctggctaacatggtgaaaccctgtctctactaaaaatacaaaaattagctggggcgggtggcgagtgcctgtagtcccagctactcaagaggctgaggcaagagaatggagtgaacccgggaggcggagcttgcagtgtgccaagaatgtgccactgcactccagcctgggtgacagagcgaaactccatctcaaaaaatataaataaataaataaaaataaagccaggaagtgcacagtgttccattttaacaagcacagaactataaaagaagatgctccttacaaaacagcaaggacgcccaaggagtgttcttgtacatccagagccccgagcacagtgtccagatgggataagttcttcgcaaggagttccccactcttgttgatcagttcacaaagctgtgtcatttgccctggaaaacaggaacaacactattgcatttcagctacagcactaaccaaactgatggaactctaaccacaactttgtacttcagagcctgaagttcccaaaattgattcttaatctccttcacttcggatgaggatccagaaggaccagaggagtgaaacaacctgtccgtggtctcaaaacgaattagagattacactggacctcccacttctctctgaccctgaatgtttcacctttttctctattctgttttctagtctcccaagccagaaatgcacgttactattaacagctctctgcatccaaatgatttagttttacttccaaagtctctcagctccatttctttctctctcccctctctgccctaattcagatcctcatcattttttgtctggactacatcttttttttttttttaagatggagtttcactgtgtcgcccaggctggagtgcagtggcgcaatctcggttcactacaacctccgccctccaagttcaagcaattctcctgcctcagcctcccaaatagctgggattacaggcgcctgccactgcacctggctaatttttttgtatttttagtagagacgggggtttcaccttcttggccaggctggtcttgaactcctgacctcatgatccaccgcgcccagcctacatcataaatcttctaaatggtctgcctactgtgatctttctctcctccaacccgcactccatattagtactgtctgttctataaactgtgcattcaatcaagttattccaatgactttaagaagtgcaaacgcctcagcctgaactaaggcccttcaataactggtccctgctacctttccagccttatctcctgctacttcccctcacacacctactcttcgatcacagcaagctcagaaaatcaacattctatcttctctcctctttatgcttctacacatgctgttctctgtccttctcccccacatcctctgctacctgactgagcctcatccagcattcagcaatcaacttgtggcgtctctagaccctcatctcagctcccttccccatggctaagctgggtatctgccctctctgcctcgcatgggactgtagtggttaggtatttcagtaaactcaggtggagggattgtccctttctccagctctagaatacatcacctgcttagcagttcatcaagcagctacttgttgaattaatctcctaattgatctatttttcccctatactgcaatactatgtttgttttgttttgttttttgagacagggtctcattctgtcgctcaggctgcagtgcagtggtgtgatcacagctcaacgcagcctccatctcctgggctcaagcaatcctcccaccttagcctcccgagtagctggaactacaggtgtacgtcaccatgcccatcttattttttaagttttttgcagagacaggggtctcactatgttgcccagtctggtctctaactcctgggctcaagcaatcctcccaccttggcctcccaaagtgctgggattagaggcatgagccaccacactcagcctgcaatgctacattttaacaactaaggtacagaatctattaataattaggcctcagccgggtgctgtggctcacacctgtaatcccagcactttgggaggataaggtgggcagatctctcgaggtcaggagttcaagaccaggctggctcacacctgtaatcccagcactttgggaggataaggtgggcagatatctcgaggtcaggagttcaagaccaggctggccaacatggtgaaaccctgtctccactaaaaatacaaaaattagctgggtgtggtggcacacacctgtaatcccagctactcgggaggctgaggtgggagaatcctttaacctgggacaatccttgaacccgggagatggaggctgcagtgagctgagattgcgccactgtactccagcctgggcaacagagcaagactccgtttcgggggaaaaaaaaaattaggcctgaattggtacctttaagtagacccatcaattttgacaattactgtcatgacagataccatggtcacactctgtctttctggtaacagtgaggatatatttaagtccatgggcattaacctcaagtttccaacttctctatttctacagagcaactgcataatcttttccttactaaaagaatacaacatagtataatgcttaaaatacaagtgactatagctaggtacttttgataatttaacacttttcaatttgatacattttactgaaagcaaaggaaatgtatcattattatacatgcattacaaaacaagaataaaacagctgtgatcttattaggtgtcacctcttgagatcacacagatttaactgggaaataccaactcatcatcattgtattacagatctcactggtaggtatgaagtaacttctagttgaataatttgcctttgtaaaccattactctaaatatattaacaataatttgtaacacccagaaataagcattgcaatccattagttctctactagttaacaatcagtgcccagttgagactgaaataaaagctgggtcactatgaaatcaccagataattaattagtgcagggccaagggcagagtaaaaaaaaaaagtttaagtgtcacagagtgcatttgaaatcagtgtaaccagagatgtggccaataaaattcttttttttcttttttttttttttgagacggagtcttgctctgtcacccagactggagggcagtggcgcgatcttggctcactgcaagctccacctcccaggttcatgccattctcctgcctcagcctcccgagtagctgagattacaggcgcccgccaccatgcctggctaattttgcatttttagtagagacagggtttcaccatgttggccagggtggtcttgaactcctgacctcagatgatccgcccgcctcggcctcccaaagtgctggaattacaggagtgagccactgcgcctggcctgaaactcaaagatttcctatccagtgagtgtgaggcacagtagccgacagcaatgaaagttaccatatttatctctgtctagcagactgttcctatagcatcctataacctgaagaccacaacagccctagttctgttttgtaattaagaaaattggcccagggaaattaagtggttcacccaagaagtgaccgcgacaggatttcaacctgaagcttctaactacactacaccccaggaaggagaacactaagtatttgtcgaataaattaacaaaccagtggttcctttattcatagaaaaggcaagcctgtgccttccctgtgaacctcatttctattaataaaaaggaaaaagaggaagaattcttattaagtgcagctccatatcagaccatttgtcttacaccagtgaggtaaaagcacccctccatttttacaatggagatgcaaaagactcagagattaaaggttatttgtccaaggtcaagcagctcctagaactttgcaattaatgacggtaacaataatttgcagctatatttattgcaccccttatgacaggcactgttccaactgcttttacatggtttctctcattgaatcttcacaactctacataaactagggacttattttgcagacgaagaaactgaagcacgggatagttaaaagggccttcacagccagcatctaatcattcgaatttcaggtccagaattcggtacattcatacgcaatgaatgaaccaaacaacctggaaagtgcgagtaaaatcatcacaattctacccctagaaatggagtcctggccgggcgcagtggctcacgcctgtaatcctagcactttgggaggccgaggtgggcggatcacttcaggtgaggagttcgaaaccagcttggccaacatggtaaaaaccccatctctattaaaaatacgaaaaaattagccgcgtgggctggccgcggtggctcatgcctgtaatcccagcactttgggaggccgaggccagtggatcacctgagatcaaggttcgagaccagccaggccaacatggtgaaaccctgtctctactaaaaatacaaaaattagccgggcaggcgcctgtaatcccagctactcgggaggctgagacaggagaatcgcttgaacctcgaaggcgaaggttgaggtgagccgagaccgcgccactgcactccagcctgggagacagtgagactccgtctcaaaaaaaaaaaaagccgtgtgagctggcgggcgcctgtaatctcagctactcgggaggctgagacaggagaatcgcttgaagccgggaggctgaggttgcagtgagccgagatcgcgccactgcactccagcctcggctaaaaaaaaacaaagaagaagaaatggagtcctacgagcgagagcttccgcagcattctgtaggaccaaaataggcgcacaggttcccgagcgtgcgccgcctggcagcggaggagctggcagaggcgagccatagagccaagacacccagaacggactcgcctcccgcccgctcccggcggcctagtcagcaagctgcggatcggcggcaaagatgacatggcggtgcgccaatcaccgaaggcaagagagacagaaggaaccaatagtcgcccgagatggctcctggcggaagtcacgcccccaaactgtcaagcaaagcgcccggtggaaggggcccaggccggggggagggggctcccggcggcccgagggaggggaggccggccggcgaggacagcggagcgcgagggggctgcctacactcggccgcgctcgatcctgccctgatctaaacgccgcaaccccaagcccggccccggagaagagtctcaggactaaaagggctgttccagccgtccgtgctggcgcctggggatccaggccagttcccggtacccgcccatgcccagcccggcggcctagggcgttaccttgagctgagagctgtcggacactgttcacgaactgctccagggcagacgccatgttttcccccgggcggcccgagcggcgaaggcagcacgcgcgggaaaaggctgccgctctgggaggaggggccgcggcgatccacctgag

SEQ ID NO: 622 - DNA, 8253 bp, Homo sapiens
  misc_feature (231): n equals a,t,g, or c
  misc_feature (236): n equals a,t,g, or c
  misc_feature (721): n equals a,t,g, or c
  misc_feature (4744): n equals a,t,g, or c
  misc_feature (4816): n equals a,t,g, or c
  misc_feature (7425): n equals a,t,g, or c
  misc_feature (8170): n equals a,t,g, or c
catctgcatcttgtctatggcttgcttaaggatgccaattcctcgcaggggctgtcagaaatgacatctctttcagataagttctcaaagatggcagcacattggatcttatgttgtcacttataaataaaaaataacactaattgataggttcctttaaatagcaatatgaggtttccatactctttcaggaaatttctgtcccatttaagtcagaaaacttttcttaangctgntttcttggaatttttagataactcagcaccattttttaaatcataaaaagcttttatttttacaatgaagatcaataatcaaaaacagtattactttctcaacagtttattatattaacatctaaacaaatgaaaactttccaaatcacttattatacaagagacaacagcctatgcttaggaaaattacttgtggctaagggtgttggcattttcccatagggcagtctaccccttacctggtagtaaattactaccaaaactaacaccatagatttcaaaaggactgtttcctgccctgattataaataagaagaccaagtgtcaagtaaggcataatcagtttttggcagactaaaatatagtctcttccaaaattgctgggcacggtggctcacacctgtaatcccagcattttgggaggccaagatgggtggatcatgaggtcaggagatcaagattatcctggccaacatggcaaaacncccatgtctactaaaaatacaaaaattagccgggcatggtgggatgtgcctgtggtcccagctactcaggaggctgaggcaggagaatcgcttgaacccgggaggcggaggttgcagtgagctgagatcgcgccactgcactccagcctgggcaacagagcaagaccccatctcaaaaaaacaacaacaacaacaacaacaacaaaaatatatatatatatatgtgaagagactaaaaatagctcaataacttacagctttttcaaaaactcatgatttttcttaaccatctctttcaaacatggttacttagtactacaaaataacaactggttctattttcagcctctttcaaaccactaatcttaaatttactttcaaattaaaaagaaacacctggctgggtgaagtggctcacacctgtaatctcagccctttgggaggctgaagcaggcggatcaccagaggtcaggagttctagaggctagcctggccaacatggcaaaacctcacctctattaaaaatacaaaaatcactgggaggccgaggcaggcggatcgcctgtggtcaggagtttgacaccagcctggcaaacatggtgaaaccctgtctctactaaaaatacaaaaattagccgggcatggtgtcaggcacctgtaatcccagctacttgggaggctgaggcagaagaactgcttgaacccaggaggcggaagttgcagtgagccgagattgcgccattgcactccagcctgggtgacagagcgagactctgtctcaaaaaacaaaacaaaacaaaaatcagctgggaaaggtgacatgcgcctgtagtcccagctactcaggaggctgaggcacgagaatcgcctgaagctggaaggtggaggttgcagtgagctgagatcacaccactgcactccagcctaggcaacagaatgagactccatttcaaaaaaataaataactaaataaattttttaaaaatccacattataaattatgtattataaaagataaagaatgaaataactgttcagattaagggacactaaagaaacaaagcagtctaatgcaatccatggtccacggttttcttttgctatataatatatagtacactgtccaaacagctaatgtccttttatagcaaaagacagtccttttcactgggggaaaatctaaatggggtctgtcaatttgttgatgcattatattaacgttcatttctgggccgggcgtggtggctcacgcctgtaatcctggcactttgggaggccaaggcgggaggattgcctgagctcaggagttcgagaccagcctggcaacatggtgaaaccccgtctctactaaaatacaaaaaattagctgggcgtggcagcatgcacctgtagtccccagctactcaggaggctgaggcagaagaattgcttgaacctgggaggtggaggttgcagtgaccagagatggcgccactgcactccagcctaggcatcagagcgagactctgtctccaaaaaaaaaaacagtaagagttcatttctggatgctgaccattacactatactatgtaacagaatgtcctaatttttaggctttacccactgaagtatttagggataaagaacagcaatagcatatgtgcaacttactctacaatggctcagaataaaagaggaagagaaaaaaaaaagaataagtgcggtaaaatgttaacatttggaaaatctaggtaaaatgtatgagaattttttatattatttttgaagctttttgtaaggctaaaataatgtcctaattaaaagttaaaagaaaaaatgtaacagacaaaacccagcatattacaacataaagggtactggcttggtaattccaactacttggtagttccagcagcagcctccctgaggtgccaaaccaccccgtgcctccacctcattcaggggatgcggggactgcctgagcttacagcaatggctgtgagtgctctcaagtgaccacagatgtctaggtggtggatgctcagtactaactggaatcttgataaagtaattcattgtgtaagctagttacatattataacaaaactaggaatacttgaatagtatttcttacctgttttctttccacaagtgcatttgttagctgatggcaaagcccagcaactagatacaataacaaaatattcaaaatataaatataaccacaagggcaaaatattttcaatggagaataaaatgttatttagcttacaagtgtctgttgcatatcgaatgtgctccccattacaagtgctgatgaagagctgaacctgtgagaatagcgtttcgaagtcaggaacactgggcatagaaaacttcacaaacctagaataaggagaaaagaatcaaattaccctgatagttcatgggataaaatacagaaacaatgtatgcaagaaatccatcctgcctccaatactctgtaaaattaaatgagcaacagtattttttagaattaagaactaggccaggacagtggctcatgcccgtaatccaagcactttgggaggctgaggcaggaggactgcttaaggccaggagtttgagaccagtctgagcaacatggtgagaccctgtctctactacaaaaaataaattagccaggcgtgggggtacatgcctgtagttgcagatacttgggaggctgaggctggaggatcacttgtgcctagaaggttgaggctgcagtgagctatgatcatgccactgcactccagcctgggtgacagagcaagatccagtctcaaaaaacaaataaataagaactagaatccatgagattttcctgacctggttattttgcacaatcactatacagaacggacacaaataagggttaagaaaaatatgtttaggcctggcgcagtggctcatgcctgtaatcccagcaccttgggaggccaaggcgggaggatcacctaaggtcgggagttcgagaccagcctgatcaacatggaaaaacctcgtctctactaaaaatacaaaaaaattagccgggcgtggtggtgcatgcatgcgctgtaaccccagctactcgggaggctgaggaactgcttgaacccgggaggtggaggttgcagtgagctgagatggtgccactgcactccagcctgggcaacaagagcgagactgtctcaaaaaaaaaatctatatatatctatatatatatatatatacacacatacacacacatatgtttaataatatatattaaataataaacatgtatatattaaacatatatgttttatatatatatatatgtttaataaggaacaactttcaagatgaaaaattccactaaatgaagccaaataggctgggcatggtggctcaagcctgtaatcccagcactacggaaggccaaggtgggcagatgggcagatcacaaggtcaggagttcgagaccagcctagccaatatggtgaaaacccatgtctgctaaaaatacaaaaattggccaggcacggtggctcacgcctataatcccagcactttgggaggccaaggcgggtggatcacctgaggtcaggatttcaagaccagcctgaccaatcgggtgaaaccccatctctacaaaaaatagaaaaattagccgggcgtggtggcaggtgcctgtaatcccacctatttgggaggctgagacaggagaattgcttgaacccaggaggcagagtttgcagtgagctgagatcgtgccactgcactccagcccgggtgacggagtgagactcgtctcaaaaaaaaaaactcctttatgtttatacaaatcctgaaaatttgttttaaaaaatggccatctcaattgtggggactatagtttgcatttatctgaatacttttatccatgtaatccacaggaatgtccacattttctaaattaaaaagaagttcggaggagtactgccacagggcatggcagaatacattgaatgaaaatattggctgggcacagttgctcataatcccaacactttgggaggnccaaggtcggaggatcatttgaggccaggagtttgagaccagcctaggcaacataatatggccctatctctngcaaagaataaaaatattagctgggtgtagtggtacatgcctatagtcctagcttctcaagatgctgaggtgggaggattgcttgagcccagaagttcaaggcttcagtaagctacaattaagccattgcactccagcctacatgacaaagtgagaccttttctcaaaaaaagaaaaagtatcaaagatccaaagcaacattgcttagaattcccttcaaacaaatttaagctatttaagaccaaattaaatagaccttattttaattggggttccttgtaaccgtgtacttgacagtagaattctttttctcttgatgttatagtattataaattgggatattgtggttgtcatgacatttgaaatgatataaataaactgagaagaaattgacttaaagtgagagtctggcttcacttacgctgggattcctgagacaaaggtatgtgtccggagcagagtttagagaagaagctttgtcagaatggaaggatctagagttatgctctgcagtatggtggccactagccatatgcagctatttaaattaaaattaaagattcaggtgcacttgccatgtttcaagtactcagtagccacatgtggtcacatgtccttgtcttagcacaggtttgtaacatttccaccactgcagatagttctattggacagtgctggtaaggatttctactgtctgtattttcttatttatatgaaagagcagatgctgggcacagtggctcacacctgtaatcctagcactttgggaggctctgtttgagaccagcctgggaaacatagcaagaccccatctctacagaaaaaaaaagtggccaggtatggtggcttatgcctgtaatcccaggactttgggaggctgagatgggcagattgcttgagctcaggagttcaagaccagcctgggaaacgtgatgaaaccctgtctttacaaaaaaacacaaaaattaggcgggcgtggtggtgtacacctgtggtcctggctactcaggaggctgaggttggaagatcacttgagtccatgagattgaagctgcagtgagctgtgctcatgccactgcactcctgactgggtgacagaacaagaccttgtccccccaaaagaaaaaaagttagctgagtgtggtggcacatgcctgtggtcccagctacccaggaggctaaagtgggaggactgcttgagcctgggaggtcgaggctacagtgagctatgcttgcaccactgcacttcagcctgagtgacatcaagaccctatctcaagaaagaacagagagcatgcatgttttatacacacataaactcacataaacatatatatcaggtgagtaatggacatgaatgcattttgaaggtataaggtgtttaccgttgtatatgttagataaggtatggaaagaaccctgagcttctggctgaggaccctggttttgaatctacatattcttccaattttgagttgtggggccctgagcttcatatttttatttataaactggcagtcgcaatgcctcactgacctattgtgaaccccagatgaaattgtttctgacatgtcttgataattacaaagtgtaaatacagatgtatggtgacattgttaagtcaaataatacagtatagatggaagcagataaaccaaaagatgtagtagaaattatgattagcttttcttttttttttttttgagacagagtctcacactctgtcacccagactggagtgcagtggcgttgtctcagctcactgcaacctccgcctcccaggttcaagccattctcctgcctcagcctcccgagtagctgggactacaggtgcatgccaccacacccggctaatttttgtatttttagtagagacagggtctcactatgttggccaggctggtcttgaactcctgaacttgtgatccacccgccttggcctcccaaagtgccgggattacagatgtaagccactgtgtctggcctaatttttcttgaaattacatttcaatcgtgcttttttttttttttaaagaatttgaaatttacttacaaccaatgccttaatagtgctaagtttacatgatttctcccctaaaacctatcaccagtgcctccttggagtgtttctcatggcagtctgagttacttgggaaggatcacctgagtcctccctcttctcaccactctactcctcttgtcctgcctatcagttgttctgtcagtgttattctcagatagaccacacagctggtggcagcatctttaacttaagctgctgcccacctccagccagcccatagctctcactcttggcccccttagtatgttctcaaagcaggaaaagcaacaactgattttttttttttttttgagagagtctccctctgtcgcccaggctggagtgcagtggtgcaatcttggctcactgcaacctctgccttccaggctcaagcaattctcatgcctcagccacctgagtagctgggactacagggcatgcgccaacacacccggctagtttttttattagtagagacagggtttcaccagttggccaggcaggtctggagctcctggccccaagtgatccacctgcctctgcctncccaaaatgttgggattagaggcgggagccactgtgcccagctgcaacaactgattttatttttttgagacagtctcgctctgtcacccaggctagagtacagtggcgcgaccttggctcactggcaacctctttatgcccggatacataaaagagtttttaaaaatgataaaattgaacaaaatataacaagcaattattagctggaatcaataaactgtaactgccataactttagttttgcaaaagagctcaatgttatttacaatggtttactttctacaccaaaaaataaataaataaataaaaataaagccagggctgggcgtggtggctcacgcctgtaatcccagcattttgggaggccaaggtgggcggaccaagaggtcaggagatcgagatcatcctggctaacatggtgaaaccctgtctctactaaaaatacaaaaattagctggggcgggtggcgagtgcctgtagtcccagctactcaagaggctgaggcaagagaatggagtgaacccgggaggcggagcttgcagtgtgccaagaatgtgccactgcactccagcctgggtgacagagcgaaactccatctcaaaaaatataaataaataaataaaaataaagccaggaagtgcacagtgttccattttaacaagcacagaactataaaagaagatgctccttacaaaacagcaaggacgcccaaggagtgttcttgtacatccagagccccgagcancagtgtccagatgggataagttcttcgcaaggagttccccactcttgttgatcagttcacaaagctgtgtcatttgccctgga

SEQ ID NO: 623 - DNA, 676 bp, Homo sapiens
catggaaacagcctgaattcgccgtagccggaaattagtgttccatagtcccctgcatctttattcactgcacttctgaaatccctccgcaggttaaatggggatagtgggcaaaagaaggaaggaaactcataattaagcaagtattttctggttctggattttgctagagaggccctgcggttttccacctggacagatacttcaatgaagcacaacttcgttgccacgtctcccgtgaggttttccccgtgatattagactctggagccaagcagcctgggttcaactgccttttctaccacttagtagctgtgtgacgttgagcgggtcacttgactgtcgtgtgcattgttttccccatctgtaaaatcttagtgtccttaaccacgtaaaacacttaggacagtgcataggacgtagggagaactatagttattcattcaaggtgtacgttgaatgaatcgatcccttccctgcaaaaaataaataaataagtaacaccacacacagaaagtgaattgatttttcccatctgggattgatgtctccctcctccgcttgtcgcctaaagcactttgttcttctcatgttgcacttctactctgttacagaaatgtgtctctatagtccatgtgatatctgtaaaccaaaaataaaagtctaagccccccaa

SEQ ID NO: 624 - DNA, 635 bp, Homo sapiens
ttgtatttttaatagagatggggtttcaccatgttggccaggctggtctcaaactcctgacctcaggtgatatacctgcctcagcctcccaaagtgctgggattataggcgtgagccaccgtgcccggttgtgcacttatgtttgatttttgcagaaccacccttccctaatggttgtctcctagatccaaggtgactttattcattttagaatgaacttaccccattgatactgtaaccagagttggcatacatcacgattggcagaacttggtcatgtttagcgagacggaagtgttctggaaactcctccttatagacgtggaggtgacggtgcgcattcttcagtgcctggtaaagggcttcctcttgccccagtttgggtaggggcatcccaaagccaccgtagcccacaatatcaaacttgaccaggtccctgaacttgacgtagtaggacaaggggatcttgttgacattgggtctcttcttcatggttgtcatcccatggcctcatgtgatgatgacactgaggtgctctgcaggctgtgcttctctgtggctcctaccagatacccgatggtcctgtcgatttgctgaatcatcaacttcctgttctctgcctctggcccgaatcg

SEQ ID NO: 625 - DNA, 519 bp, Homo sapiens
ccaccgtgcttggctgtgcacttatgtttgatttttgcagaaccacccttccctaatggttgtctcctagttccaaagtgactttattcattttagaatgaacttaccccattgatactgtaaccacagttggcatacatcatgattggcagaacttggtcatgtttagcgagatggaagtcttctggaaactccttcttgtagacgtggaggtcagggtgcacattcttcagtgcctggtaaagggcttcctcttgccccaatttggttaggggcatcccaaagccaccgtagcccacaatatcaaacttgacacagtccctgaacttgatgtagttggacaagggatcttgttgacattgggtctcttcttcacggtggtcatcccatggtctcatgtgatgatgacgctgaggtgctctgcaggctgtgcttctcagtggctcccaccagatacccgatggtcctgttgatttgctgaatcatcaacttcctgttctctgcctctggcctgaatcg

SEQ ID NO: 626 - DNA, 519 bp, Homo sapiens
ccaccgtgcctggctgtgcacttatgtttgatttttgcagaaccacccttccctaatggttgtctcctagttccaaagtgactttattcattttagaatgaacttaccccattgatactgtaaccacagttggcatacatcatgattggcagaacttggtcatgtttagcgagatggaagtcttctggaaactccttcttgtagacgtggaggtcagggtgcacattcttcagtgcctggtaaagggcttcctcttgccccaatttggttaggggcatcccaaagccaccgtagcccacaatatcaaacttgacacagtccctgaacttgatgtagttggacaagggatcttgttgacattgggtctcttcttcacggtggtcatcccatggtctcatgtgatgatgacgctgaggtgctctgcaggctgtgcttctcagtggctcccaccagatacccgatggtcctgttgatttgctgaatcatcaacttcctgttctctgcctctggcctgaatcg

SEQ ID NO: 627 - DNA, 638 bp, Homo sapiens
ttgtatttttagtagagctggggtgtcaccatgttggccaggctggtctcaaactcctgacctcaggttatacacttgcctcagcctcccaaagtgctaggattataggcgtgaaccaccgtgcctggctgtgcactaatgtttgatttttgcagaaccacccttccctaatggttgtctcctagatctaaggtgactttattcattttagaatgaacttaccccattgatactgtaaccagagttggcatacatcacgattggcagaacccggtcatgtttagcgatatggaagtgttctggaaactcctccttcttgtagacgtggaggtgacggtgcgcattcttcagtgcctggtaaagggcttcctcttgccccaacttgggcaggggcatcccaaagccaccgtagcgcacaatatcaaacttgaccaggtccctgaacttgacgtagttggacaaggggatcttgttgacattgggtctcttctttacggtggtcatcccacggtctcatgtagtgatgacgctgaggtgctctgcaggctgtgcttctcagtggctcccaccagatacccgatggtcctgtcgatttgctgaatcatcaacttccttttctctgcctctggcccgaatcg

SEQ ID NO: 628 - DNA, 638 bp, Homo sapiens
ttgtatttttagtagagatggggtttcaccatgttggccaggctggtctcaaactcctgacctcaggtgatacacctgcctcagcctcccaaagtgctgggattatgcgcatgagccaccgtgcctggctgtgcacttatgtttgatttttgcagaaccacccttccctaatggttgtctcctagatccaaggtgactttattcattttagaatgaacttaccccattgatagtgtaaccagagttggcatacatcacgattggcagaacccggtcatgtttagcgatatggaagtgttctggaaactcctccttcttgtagatgtggaggtgagggtacgcattcttcagtgcctggtaaagggcttcttcttgccccgatttgggcaggggcatcccaaagccaccatagcccacaatatcaaacttgacccagtccctgaacttgatgtagttggacaaggggatcttgttgacattgggtctcttcttctcggtggtcaccccatggtctcgtgtgatgatgacgctgaggtgctctgcaggctgtgcttctcagtggctccctccagatacccgatggtcctgccgatttgctgaatcatcaacttcctgttctctgcctctggcccgaatcg

SEQ ID NO: 629 - DNA, 636 bp, Homo sapiens
ttgtatttttagtagagatggggtttcaccatattggccaggctggtctcaaactcctgacctcaggtgatacacctgcctcagcctcccaaagtgctgggattataggcgtgagccaccgtgcctggctgtgcacttatgtttgatttttgagaaccacccttccctaatggttgtctcctagatccaaggtgactttattcattttagaatgaacttatcccattaatactgtaactagagttggcatacatcacgattggcagaacccggtcatgtttagcgagatggaagtgttctggaaactcctccttcttgtagacctggaggtgagggtgcgcattcttcagtgcctggtaaagggcttcctcttgccccaatttgggtaggggcagcccaaagccaccgtagcccgcaatatcaaacttgacccagaccctgaacttgatgtagttggtcaagggatcttgttgacgttgggtctcttcttcacggtggtcaccccatggtctgatgtgatgatgacgctgaggtgctctgcaggctgtgcttctcagtggctcccaccagatacacgatggtcctgccgatttgctgaatcatcaacttcctcttctctgcctctggcccgaatcg

SEQ ID NO: 630 - DNA, 438 bp, Homo sapiens
ttgtatttttagtagagctggggtgtcacgatgttggccaggctggtctcaaactcctgacctcaggttatacacttgcctcagcctcccaaagtgctaggattataggcgtgaaccaccgtgcctggctgtgcactaatgtttgatttttgcagaaccacccttccctaatggttgtctcctagatctaaggtgactttattcattttagaatgaacttaccccattgatactgtaaccagagttggcatacatcacgattggcagaacccggtcatgtttagcgatatggaagtgttctggaaactcctccttcttgtagacgtggaggtgacggtgcgcattcttcagtgcctggtaaagggcttcctcttgccccaacttgggcaggggcatccaaaagcaaccgtgcgcacaatattaaacttggaccaggtc

SEQ ID NO: 631 - DNA, 637 bp, Homo sapiens
ttgtatttctagtagagatggggtttcaccatgttggccaggcttgtctcaaactcctgacctcaggtgatacacctgcctcagcctcccaaagtgctgggattataggcgtgagccaccgtgcccggctgtgctcttatgtttgatttttgcagaaccacccttccctaatggatgtctcctagatccaaggtgactttattcattttagaatgaacttaccccattgatactgtaaccaaagttggcatacatcacgattggcagaacccggtcatgtttagcgagatggaagtgttctggaaacccctccttcttgtagatgtggaggtgagggtacgcattcttcagtgcctggtaaagggcttcctcttgccccaatttgggcaggggcatcccaaagccaccgtagcccacaatatcaaacttgaccaagtccataaacttgatgtagttggacaagggatcttgttgacattgggtctcttcttcacggtggtcatcccatggtctcatgtgatgatgacgctgaggtgttctgcaggctgtgcttctcagtggctcccaccagatacctgatggtcctgtcgatttgctgaatcatcaacttcctattctctgcctctggcctgaatcg

SEQ ID NO: 632 - DNA, 1148 bp, Homo sapiens
atccagaagtgggatgtggctctggcctggccagaggacagaggatgctgcatgccatggctacagcaactggttcagtttgggctcatgtcctagtcagagccaatgagatataatcttgggatatctgctgggctgttgggaaagggacaggctgccctgttcatccccattcctgatgctgagggatctgagaaaatcacttgtaaaatttgggggtgtttggaagaaggggagactgatgtctccttctctctacaggcatctgatcagctacagagcttgactgacctacccagaggcagaatgatatggtggttaaaattgtgctctgggcctgtaggggtgggttgcctttccacacctgtgggtgttcctcgaagagggggatgtgtcagggtcacaagacaattgtggggagagggtcagcagacaaacacgtgaacaaaggtctttgcatcatagacaatgtaaagggttaagtgctgtgcttttagatatgcatacacataaacatcttaatgctttacaaagcagtattgctgcctgcaggtcctacttccagccttaaggcggtttttccttatctcagtagatggagcatacaatcgggttttatactgagacattccattgcctagggacaggcaggagacagatgccttcctcttgtctcaactgcaagaggcattctttcctcttttactaatcctcctcagcacagaccctttacgggtgtcgggctgggggacagtcaggtctttcctttcctacgaggccatatttcagactatcacatggggagaaaccttggacaatacctggctttcctaggcagaggtccctgcggccttccgcagtttttgtgtgcttgggtacttgagattagggagtggtgatgactcttaaggagcatgctgccttcaagcatctgtttaacaaagcacatcttgcaccgcccttaatccattcaactctgagttgacacagcacatgtttcagagagcacgggattggaggtaaggtcacagaatctcaaggcagaagaatttttcttagtacataacaaaatggagtctcctatgtctacttctttctacacagacacagtaacaatctgatctctcttgcttttccccacatttccc

SEQ ID NO: 633 - DNA, 170 bp, Homo sapiens
gagagtgagcgcgagggctgctagcatgctgtcacctctcaatagcacttgagggttcttgtctttacccaggaaagaattcaagggcaagccggaggtttagaagaaaacagctttattgaagaggcagcattacagccctgtgactgctcctgtagggcagggctacc

SEQ ID NO: 634 - DNA, 512 bp, Homo sapiens
atccagaagtgggatgtggctctggcctggccagaggacagaggatgctgcatgccatggctacagcaactggttcagtttgggctcatgtcctagtcagagccaatgagatataatcttgggatatctgctgggctgttgggaaagggacaggctgccctgttcatccccattcctgatgctgagggatctgagaaaatcacttgtaaaatttgggggtgtttggaagaaggggagactgatgtctccttctctctacaggcatctgatcagctacagagcttgactgacctacccagaggcagaatgatatggtggttaaaattgtgctctgggcctgtaggggtgggttgcctttccacacctgtgggtgttcctcgaagagggggatgtgtcagggtcacaagacaattgtggggagagggtcagcagacaaacacgtgaacaaaggtctttgcatcatagacaatgtaaagggttaagtgctgtgcttttagatatgcatacacata

SEQ ID NO: 635 - DNA, 674 bp, Homo sapiens
tcagccttccaagtagcagggattacaaagccagctagctttaagatacggtgttgggcatcacgttttggcatggagcaggcagtcttttctttgcccccaggtgggactaagccaccacaagccttccctggtgtgtgcagtgggtgatgaatgcttgcctgctcagcacccacttcctggtgggctgggtcacattactatgactcccccttgagcttcagtccgcgcctggttggagattattgactcaacccggggatccagaggtgggatgtagctctggcctggccagaggaccgaggatgctgcatgccatggctacagctactggttcagctttgggctcatgtcctagtcagagccaatgagatgtaatcttgggatatctgctgggctgttgggaaggggacaggctgccctgcacatccccattcctgatgctgagggatctgagaaaatcacttgtaaaatttgggggtgtttggaagaaggggagattgatgtctctttctctctacagacatctgatcagctacagagcttgactaacctacccagaggcagaatgatatggtggttaaaagtgtgctctgggccgagattttgccactgcacttcagcctgggtgacagagtgagactccatctcaaaaaaaaaaaaaaaaaaaaaaa

SEQ ID NO: 636 - DNA, 632 bp, Homo sapiens
aaagccagctagctttaagatacggtgttgggcatcacattgtggcatggagcaggcactcttttctttgcccccaggtgggactaagccaccacaagccttccctggtgtgtgcagtgggtgatgaatgcttgcctgctcagcacccacttcctggtcggctgggtcacattactctgactcctccttgagcttcagtccgcgcctggttcaagattattgactcaacgcgaggatccagagatgggatgtagctctggcctggccagaggaccgaggatgctgcatgccatggctacagcaactgggtcagctttgggctcatgtcctagtcagagccaatgagatgtaatcttgggatatctgctgggctgttcggaggggacaggctgccctgcacatccccattcctgatgctgagggatctgagaaaatcacttgtaaaatttgggggtgtttggaagaaggggagattgatgtctctttctctctacagacatctgatcagctacagagcttgactaacctacccagagacagaatgatatggtggttaaaagtgtgctctgggccgagattttgccactgcacttcagcctgggtgacagagtgagactccatctcaaaaaaaa

SEQ ID NO: 637 - DNA, 336 bp, Homo sapiens
ttttttttttgagacacagtgtcactctctcacctaggctggagtgcagtggcacgatctcagctcactgcaacttctgactcctgggttcaagcaattctcgtgcctcagcctcccaagtagctgggattatagacacgtgccactatgcccagctaagttttgtgtttttagttgagatagagttttgtcgtgttggccaggctggtttcgaacccctgggctgaagtgatccacctgccttggcctcccaaagtgctgggattacatgtgtgagccactgtgcctagccctaatttttttttttttttttttttttttagtgtttgtagagat

SEQ ID NO: 638 - DNA, 672 bp, Homo sapiens
tcagccttccaagtagcagggattacaaagccagctagctttaagatacggtgttgggcatcacgttttggcatggagcaggcactcttttctttgcccccaggtgggactaagccaccacaagccttccctggtgtgtgcagtgggtgatgaatgcttgcctgctcagcacccacttcctggtgggctgggtcacattactatgactcccccttgagcttcagtccgcgcctggttggagattattgactcaacccggggatccagaggtgggatgtagctctggcctggccagaggaccgaggatgctgcatgccatggctacagctactggttcagctttgggctcatgtcctagtcagagccaatgagatgtaatcttgggatatctgctgggctgttgggaaggggacaggctgccctgcacatccccattcctgatgctgagggatctgagaaaatcacttgtaaaatttgggggtgtttggaagaaggggagattgatgtctctttctctctacagacatctgatcagctacagagcttgactaacctacccagaggcagaatgatatggtggttaaaagtgtgctctgggccgagattttgccactgcacttcagcctgggtgacagagtgagactccatctcaaaaaaaaaaaaaaaaaaaaa

SEQ ID NO: 639 - DNA, 666 bp, Homo sapiens
tcagcctccaagtagctgggattacaaagccagctagctttaagatacagtgttgggcatcacattttggcacggagcaggcactcttttctttgccctcaggtgggacttagccaccacaagccttccctggtgtgtgcagtgggtgatgaatgcttgcctgctcagcacccactacatggtgggctgggtcacattactctgactcccccttgagcttcagtccgtgcctggttcaagatgtattgactcaactcgaggatccagaggtgggatgtggctctggcctggccagaggaccgaagatgctgcatgccatggctacagcaactggttcagctttgggctcatgtcctagtcagagccaatgagatgtaatcttgggatatctgctgggctgttgggaaggggacaggctgccctgctcatccccattcctgatgctgagggatctgaaaaaatcacttgtaaaattcgggggtgtttggaagatggggagactgatgtctccttctctctacagacatctgatcagctacagagcttgactgacctacccagaggcagaatgatatggtggttaaaagtgtgccctgggccgagatcttgccactgcactccagcctgggtgacagagtgagactccgtctcaaaagaaaaaaaaaa

SEQ ID NO: 640 - DNA, 365 bp, Homo sapiens
cttaactgtcttctacaatgctgcctgaaatattaggtttctcaatccaattgtcacatggcatcaaaattacaccattaccactaggcatttctcagcagagagttttctaggcaacaatgcttcttttcttcctctttctcttcataaacagaaaaacatggaatccatattttcccagaagataaacatgtgattcacttaccacgggactgtctgtaaaataactctggctcagggtgtggacatcatctcacccattgtcatcacaatattctttaagtaaccactttctgggatagaactgccccaacaaggtagcagccaggtcacatggtggttttagtttactctctcaaacatgc

SEQ ID NO: 641 - DNA, 365 bp, Homo sapiens; identical to SEQ ID NO: 640

SEQ ID NO: 642 - DNA, 470 bp, Homo sapiens
ttcttctccctccatacaaaggaaaagcttatttctgtttgattttgagacatttgcagatatctgaggttggcatgttcttcctattgcaatagtctttttgagtaaagtctctctttatctaagtcttatttgtttttaattaatatcatgcaactggatactttatagaaataagaataaatgagacacacatatatgcaacaacatgagtgaatctcacaaatataatgtgaagcataaaaagcaagaactaaatggctatatgctgtatactttatatgaagttcaaaagaggaaaaatgaacataaattgttgaaagtcaggatagtggctcccttcaggggggcaattgctggagggggacaaagagggctcctagggcactgatagtattctgtttcttgatctggaatatattcaatttgtgaagagtcacctcatgacagactcataatttggaaaactt

SEQ ID NO: 643 - DNA, 470 bp, Homo sapiens; identical to SEQ ID NO: 642

SEQ ID NO: 644 - DNA, 300 bp, Homo sapiens; identical to SEQ ID NO: 86

SEQ ID NO: 645 - DNA, 402 bp, Homo sapiens
ggtagccagaggcaactccaattcctgctaaacagtaggaagggttcttactagagacggctcttctgcctcctggggtggaggggtgccgtcaggcatggaggaaggactagcctcattgtcagtggtcacgtctccatctgtcagcgcatcaaatgagggcaatccgtcttcatccacagggagactgtctagtgtctctgtgaggactgctagcaagtttgcctcattctcttcatctatcttctgcagaaagagaaaaaaacagaagatgtgagttgaccctgggaggcaggtaacactatgcatcaacatgtttgaccaaatgagtgaaccatacgtgaaatctagaatgcccattccagaacacaaagatcatgtctttctcaaactccaaattca

SEQ ID NO: 646 - DNA, 1100 bp, Homo sapiens
tttctgttctctgtgggtttggtgtgaggagggtcatcgtttgtggtcagatatttgagaagctccgagcagggacgtctttgtggcttttgctgttgacaaatactcttcgctttattgctccatgaattctcagtcttaaaaacaaggcataaagaaagctaaaattagtgaactgaaccttatcagaatggatataggttttctggagagatgggatttttcaatgaagtgttcagtctaagtgtactagatctatgagctgtgaataactgtttgcagaacaaggaaagaaaattacatttaaaattcctaaatgacatttatgcagctttttattttatttctcctacatttcaatgttcctactcagcaacatgtaactaacaagaccctacagcgcctttattgtgaataaaaaaaatcggctggcttaaaccttaatttgccactgattgctgacgcccagtactcacaactctcttaagtaccccttaatgctccgttttcactcacagtgaatagcaagacaaacattgtttaatacagcccactagctgaattatggcattgccagcattccatccaattaatggcagagatagatgttttgtggtgattccaaaagcaatctttctcaggttagacagctagcaaaacagcaattctgcatcttaaagccactcatagataataccagcttatcagcaaattttaccgtggcccacaatgctgcaggtaacaataaagtgggcaagaactaacagacagtggcacttccattccaaacacccaaagacgatgcgtaaatgaactctgcctagtttaaagtagctcaagcgctgtttacggaatcccattcataatctatttcatcattatgaggcagcttcggggtcccagctgaattaatacctacaaacttatttgttttactgcttcaagccaaaatcctttggtacatcccccctgtattaaaaaatttacatttgtaccttaacaattgcagggtttgttctgatcctgtgattgtgatttgcatggttctgggtactgagaccactgcattcattataacttagctgagtgttggctggtgc

SEQ ID NO: 647 - DNA, 305 bp, Homo sapiens
tttctttttctttttttttttttttgagacagggtcttgctctatcgcccagactggagtgcagtggcgcgatctcggctcactgcaagctccgcctcctgggttcaagccattctcctgcctcagcctcccgagtagctgggactacaggtgtccgccaccacgcccggctaatttttttgtatttttagtgaagatggggtttcaccatgttagccaggatggtctcgatctcctgacctcgtgatccacccacctcggcctcccaaagtgctgggattaccggcgtgagctactgcgcccgg

SEQ ID NO: 648 - DNA, 482 bp, Homo sapiens
gtttcttcctaaatattttctatctgtaggtggctaaatctgtggctgtggaacccatatatatgaaaggctgactgtatattcttcaattagattactttcaaagtcataggttagtggaaatcctttaggaaaaatattatttttagcacctatagaagatcaggtgttccaagtgatatatatggttttaaaatttttaatacatgaattactaaacatttttaaatttaatactgcattttaaatttttcttgtatggcttataaccaccgcagaagatagaaaatgttattttgattttactgatggggactagaggtacagagacgttaaataacttgctcagttacatacttagtcgataaaaaagtcaaaatttgagcctaggtaatctgaccccaatttacagtccctggagtataaaggaaaaagagggactagaattcagctctaatgcaatttaacattttgaagtcacg

SEQ ID NO: 649 - DNA, 482 bp, Homo sapiens; identical to SEQ ID NO: 648

SEQ ID NO: 650 - DNA, 482 bp, Homo sapiens; identical to SEQ ID NO: 648

SEQ ID NO: 651 - DNA, 350 bp, Homo sapiens
tgagagaatagtggagatgcagaacgacagtctctgtgtggtgagtaaatacaggtttagcatcttagatctgaaaatctgaaatccaaaatgctcccaaatctgaagttttttgagcactgatgtaacacttaaagaatatgctcatacaacctgtaatgcttcaaagaagcatccaggattcatcattctcagtgagaatctaaatcagtggagctagaaagaacaagaatttaaattattactttagagtcatgtaaggagataaatttacaaggagtatttctatgcatgttcttcattttcgtaatttggatcagggtaaaaaaattagagaaagaattgctaaa

SEQ ID NO: 652 - DNA, 378 bp, Homo sapiens
gaccatttcacatgccaacatgataaagctgttcattattcccaggtttggtcatcctggttgcttaatctagcaatgttgacttaaaatgactagacagcccacagtgattgcccccggctcagggtcacactgggccctgtaacttctcattttacatcatccaaggataagactccagtacaactgtagtagatgtttgtgatgaaaatgagccctttgctgagatgttcctctgaattgagttgcaagttggccaaagctggccagagtgcagctgtaaagggagctttgtagtctccttttgttcctttgttgaattgtaaccaaagctaagggagctaccctgggctttatcccgtccccacctcttcacct

SEQ ID NO: 653 - DNA, 378 bp, Homo sapiens; identical to SEQ ID NO: 652

SEQ ID NO: 654 - DNA, 322 bp, Homo sapiens
gtgagacttcccctcaaaaaaaaaaaaaaaaaaaaaaaaaagcaggggaaactagacttattttgtggcccaaactgaaaagtctgtaaacataaaaatactcattgtatttgttttcaaatttctgcttctggccaagatgtagtagtagagatcttatttacctttcctcctgaaatgacaaagaaaaaagtcaagaaaatatatgaaagaataattttcaagacactggatattagacaacaaaggacagcaattacagaggtgggaaacagatgaagtaagcctataattacctcagcttattgccttgagagagttt

SEQ ID NO: 655 - DNA, 115 bp, Homo sapiens
acggctgtaatcccagcactttgggaggccgaggcgggtggatcacgaggtcaggagatcgagaccatcctggctaacatggtgaaaccccgtgtctactaaaagtacaaaaaaa

SEQ ID NO: 656 - DNA, 117 bp, Homo sapiens
ccggacacggtggctcacgcctgtaatcctagcactttgggaggccaaggcgggtggatcacgaggtaaggagatcgagaccatcctggctaacatggtgaaaccctgtctctacta

SEQ ID NO: 657 - DNA, 434 bp, Homo sapiens
agtgagccaagatcgcgccactgcactccagcctgggtgacagagcgagactccatctcaaaaaacaaaataaataaaataaaaaataaaacaattttgatcttacagatcccctaaatatcccctggggacccccagagaccctggtctaccctgtccagtagaatcgggttattgctaatcggttaacctgtgtgatcaggaaaatgttacatgggtgacatttgcacaagttctgtgttgacctttgagctgggtttggaacagttaatgaagagggatcttggaggtagtggtgtagagatcctgttttcctgatcccaagaggtgagatcccaaatgccctccaacagccatggcgaagagctgtcactgtctccttgaggcacagcagcgtcccccgcggcacccacttgcacagtctcaggtggggt

SEQ ID NO: 658 - DNA, 261 bp, Homo sapiens
ttttttttttttttttgacgtcacaagagtggtatttgtcaggtgctaagtcgagaataatgacactgtataaaagaaatagcctgggtgacctgttccttcctcgagatgtggatgggtgcttttgaattacagaaaaacctctgctttttgaactactgagtaaaaagggaaaaaataaccacaacccagagcttttacatttcacatatgctctctgggtatgcagtgcagggtgccatgaatgagcgcaggatttgg

SEQ ID NO: 659 - DNA, 385 bp, Homo sapiens
gccaaaggcaaatgaggtaattaattatggggcttatttattttagcattttatgtattttcttaggttttttttaattaaaaatatttttccagttgcaagatttacataaagggaaacaaaataatttaaatgtgtcaactctaatcacagatcttttcaagttaattaattttatgttataagaagctgttgctatagtttggtgtaagtcatcttacctttgctgtaacatgattgaaaatataattttttaatcctgacacaacctatgcctgtatattattgcagggaccaatcagttctttgttacttaatcacaagtgctaaatatgatgttagattgctttcttaatagccatgctgttgtatctaaataggatcc

SEQ ID NO: 660 - DNA, 385 bp, Homo sapiens; identical to SEQ ID NO: 659

SEQ ID NO: 661 - DNA, 464 bp, Homo sapiens
tgtggactctaggggttcaaggatcccaggcctgctctagaatgtgaagaaatgggctttaagctgttggctgaagttcttcgagatgaattttctgaagcagtgctgtcaaagagaattttcttgaggtgatggaatgttctacatttatgctaatatggtaatcactaataacatgttactaagcataagaaatgtagctggtgtacctaagaaactgaaaatttaattttatttaggttttttttttttagttttttgctcttgttgcccaggtcagagtgcaatgatgcaatcttggctcactgcaacctctgtctccagggttaatgtgattctcctgcctcagcctcccaagtagctgggattacagtacccgccactatgcccagttaatttttatatttttagtagagatggggtttcgccatgttggccaggctggtcttgaactccagacctca

SEQ ID NO: 662 - DNA, 464 bp, Homo sapiens; identical to SEQ ID NO: 661

SEQ ID NO: 663 - DNA, 464 bp, Homo sapiens; identical to SEQ ID NO: 661

SEQ ID NO: 664 - DNA, 643 bp, Homo sapiens
acaggtacacagaggtcacagataagcaactcctttctaaagtttggcctagactccaagggataaagtccaaaatggggtagatggagaacaacttttagttccctgataatacttatggttattactctttgtcatatttctctttcatatttgtgattcctatactgcagtggttcttagccagagggcaatctgtcccccaggggacatttggcaatgtctggagacaaactgataggcatgactagagatgctactgctttctattgagtagaggccagggatagtatgaaatatcctgtaatgcagagaacagccctacccctatcccaacaaagaattatccagcccaaaatgtcaatgctgctaaggttgagaatgcctgctatggtaaaatttattttcttacctaactgctacctgcaattaggtaagaaaattagtaccaaacacaaagctcaatcatataaatgatattttcttctgatagatcagaacaaattaagatgttaaatggacacggtatccatccctgtaccagattggtatgggtttgtttttctttggaagtgctcctccttgaatcagtgagtagtaatttttcattacaactacctttataagacaaaaatgtcagatc

SEQ ID NO: 665 - DNA, 4431 bp, Homo sapiens
cctaaaaatagaaaaagtttgtagttactctcaaaattcccccaaatcccctactttaatgcattagaaccctcttttttttcttcactgtgtccataatatattttccaacaggtctaatcaatggtgctctaactacagaacagcgaatcttaacctggggaccatgggtcatgaatggactgcagaaattctgtgacctcctggtaatttatacaaaatttgtatgtatgcattaggttgaataatacattttggcctggcatggtagttcatgcctgtgatctcagcattttgggaggccaagctggaggattgctcaagcccagaagcttgaaactagcctgggcaacatagtgagaccctgtctctacaaaaaaattaaaaaattaggctgggcgtggtggctcacatctgtaattccagcactttgggaggctgaggtgggagaactgcttgagctcaggagctcaagaccaacctgagcaacaaagcaagacctcatctctacaaaaaattaaaaagaattagccaggtgtggtgctgtgtgcctgtggtcccagctatttgggaggctgaggtgagagaatcgcttgagcctgggagctcaaggctgcagtgggctgtgattgcaccactgtactccagcctgggggtcagagcaagaccctgtctcaaaagaaaaaaaaaatccatgaaaatgataataaaacttttttttttttaaagagatggagtcttgctatgttattcaggctggccttgaactcctgggctcaagccatcttcctctctcagcctcctagatagctgggaacataggcatgcaccactatgtactacccagctgaaaatgttaattttgtatgattgaacctaatatgcttttggatggagaaagaaatatctcacctaaaaagaggttaagaacctctgactatgggagatctggatacattctattaaaatttattttgtgtagagtttgataggaaatattaaaaatcttaaagcttttaaaaattatttgatttataatttatataaaatttacttgactattttcagtgccatattataaaatttatttaatggaatacacttaaagacagataagaaagccagtatgagtcacaggttataatttttatatattcccatacatataatcaaagaacttcatgtaattcagtgttgaatctcactgaaattcatgcttaaagcatgctgctatatagaatctctccacaataagcaggaaaagtcattttcttttctttttccttttcttttcttttttttttttttgagacagggtctcgctctgtcatccagtggtgcaatcacagctcactgcaacttcaatctcctggggcccaagcgatcctcccaccccagcctcctgagtagctgggactataggtgcatgccacatacctggctaattaacattttttttgtagagatggggtctcactatgttgcctaggctggtcttgaactcctgggctcaactgatagtcctgcctcggcctcccaaagtgatggggttacaggtgtaagccccattttctaaattaggcaccaatggggcatctctttcaatcttatttgccatgcatttctgtacttcagtgtatcctgtaataaggttacagcgaataatgacgactatactataacaactaatatactatgacttgctgcatgatgtacttggtgctaagtgcttaatgatacattttcacaagtattttatagctacaaaaacagttcttttataatctgtattttacagaggatacaactaaagctcagtaaagtaaaatgattgccaaaaaccgcacagctaagtaagtgatgtagacagaatgtgaaaccatgtatattctgattctagagtgtctactcttaatcactgcattatctttccagatactataaatataataatagtaacagtaacagtaagtaagtggagaagccagacttccaacccagggttgttagactccaaagtctgttttattttttttaaactaccatatgatactttctgaacagttaagctgtaataaatgaattagaacagtgagttattgagacttttatagacaaagtaagaggtcttagtctctgattttgagagtttttaaaatcttatagtagaatcagagaaaaatccaagatgaaaaccagcatatattttcctaattaaatatcatgtaataactttctttgactctttacagaagagtcaataaggaaaaaaaaaagtattttttctgcagttggcttaccaaataaaagagccagtttttgccaaaggtgaaattactaaggttaaaaaataaattaaaagagccagttttgcatccctattttcaataatctttaaaattgcttttggaagtattattaagttgttttgggaaatattcatatttccagatttttttctctttgcttgggcagttaaaatggtattcgagaacagagccagataagattcagatgccctttaatcttgagttttgccttactctatgagttttataaagcggtattggtaacgccttccttcccctcatttagaacaatgagacagcacagagaccttacgtggttaaagctatcttctatttcctttctttcttttctttctctctctttttctctttctttccctccctccctccctctctctctctcttttttttttttttgacagagtttcgctcttgttgcccaggctggagtgcaatggcacaatcccgactcaccgcaacctgcgcctcccgggttcaagcgattctcctgcctcagcctcctgagtagctgggattataggcatgcgccactatgcctggctaattttgtatttttagtagacacggagtttctctatgttggtaggctggtcttgaactcccaacctcaggtgatccgcccccctcggcctccgaaagtgctgggattacaggcatgagccaccgcacccgaccttctttttctttttttttttttttgagacagagtctcactctgttgtccaggctggagtgcagtggtgtgatcggctcactgcagcctctgcctcccaggttcaagttattctcatgcctcagccacctgactagctgggattacagacacatgccaccatgccccactgatttttgcgtttttagtagagatggcattttgccatgtttcccaggctggtcccaaattcctggcctcaagtgatccacccgccttggcctcccaaactgctgggaatacagatgtgagccactgagcccagccatttctttattcagactgtacagctgccactgtgatactggggactaagcaatcttagactgagtgttaagaattttagtattggccgggtgcggtggctcacgcctgtaatcctagcactttgggaggccgaggcgggcggatcacaaagtcaggagatggagaccatcctggctaacatggtaaaatcctgtctctactaaaaatacaaaaaaattagccaggcgtggtggcatgcgcctgtagtcccagctgctggggaggctgaagcaggagaatggtgtgaacctgggaggcagagcttgcagtgagccaagatcgtgccactgcactccagcctgggtgacaaagcaagactccgtctcaaaaaaaaaaaaaaaaaaaaaagaattttagtattgctagtcataattctttgacttttcctcctatttcccacctcttttaggtggaggttccagtttactaaatggaaacatttcttctgagaggatctgttccctggatctacttaaaaagctcagggttaaatgagaaggacctaacccttctcatatagcccaccaaggcttgtatcaagaacattagattacttccatgattgcttttaattctgacagtccatgaaatggtcataaggtatgggttgataaggacatggttctctagtattacagttcaccctaatatgttttaaattctcatttctaaggttaagtactaaccaatctgctaatttcctcttgtctatctggtgcagatcttgctgttgccttgatcatagtggaagtctgattgtctgttagcttcttgatacatcgttgccctgccacaatattacagacctacaaatggaaaaaagttttgtactacatgtatatatcttttttttttagctcttacttagtgccaattacatgtaaataaaaatttaaaatcaacttcattaaaccacttattttcaatatgttaagtaaaaaagtagtaaacaagacagctctacagtaattaagtataattaagtaaaatgtacaccagatgaagactgaaagaagtatagtataccaaaatgttaacagtggttacattagagtggtaggattatggatgaacttgtttcgt

SEQ ID NO: 666 - DNA, 976 bp, Homo sapiens
caaagtcaggagatggagaccatcctggctaacatggtaaaatcctgtctctactaaaaatacaaaaaaattagccaggcgtggtggcatgcgcctgtagtcccagctgctggggaggctgaagcaggagaatggtgtgaacctgggaggcagagcttgcagtgagccaagatcgtgccactgcactccagcctgggtgacaaagcaagactccgtctcaaaaaaaaaaaaaaaaaaaaaagaattttagtattgctagtcataattctttgacttttcctcctatttcccacctcttttaggtggaggttccagtttactaaatggaaacatttcttctgagaggatctgttccctggatctacttaaaaagctcagggttaaatgagaaggacctaacccttctcatatagcccaccaaggcttgtatcaagaacattagattacttccatgattgcttttaattctgacagtccatgaaatggtcataaggtatgggttgataaggacatggttctctagtattacagttcaccctaatatgttttaaattctcatttctaaggttaagtactaaccaatctgctaatttcctcttgtctatctggtgcagatcttgctgttgccttgatcatagtggaagtctgattgtctgttagcttcttgatacatcgttgccctgccacaatattacagacctacaaatggaaaaaagttttgtactacatgtatatatcttttttttttagctcttacttagtgccaattacatgtaaataaaaatttaaaatcaacttcattaaaccacttattttcaatatgttaagtaaaaaagtagtaaacaagacagctctacagtaattaagtataattaagtaaaatgtacaccagatgaagactgaaagaagtatagtataccaaaatgttaacagtggttacattagagtggtaggattatggatgaacttgtttcgt

SEQ ID NO: 667 - DNA, 643 bp, Homo sapiens; identical to SEQ ID NO: 664

SEQ ID NO: 668 - DNA, 4433 bp, Homo sapiens
cctaaaaatagaaaaagtttgtagttactctcaaaattcccccaaatcccctactttaatgcattagaaccctcttttttttcttcactgtgtccataatatattttccaacaggtctaatcaatggtgctctaactacagaacagcgaatcttaacctggggaccatgggtcatgaatggactgcagaaattctgtgacctcctggtaatttatacaaaatttgtatgtatgcattaggttgaataatacattttggcctggcatggtagttcatgcctgtgatctcagcattttgggaggccaagctggaggattgctcaagcccagaagcttgaaactagcctgggcaacatagtgagaccctgtctctacaaaaaaattaaaaaattaggctgggcgtggtggctcacatctgtaattccagcactttgggaggctgaggtgggagaactgcttgagctcaggagctcaagaccaacctgagcaacaaagcaagacctcatctctacaaaaaattaaaaagaattagccaggtgtggtgctgtgtgcctgtggtcccagctatttgggaggctgaggtgagagaatcgcttgagcctgggagctcaaggctgcagtgggctgtgattgcaccactgtactccagcctgggggtcagagcaagaccctgtctcaaaagaaaaaaaaaatccatgaaaatgataataaaacttttttttttttaaagagatggagtcttgctatgttattcaggctggccttgaactcctgggctcaagccatcttcctctctcagcctcctagatagctgggaacataggcatgcaccactatgtactacccagctgaaaatgttaattttgtatgattgaacctaatatgcttttggatggagaaagaaatatctcacctaaaaagaggttaagaacctctgactatgggagatctggatacattctattaaaatttattttgtgtagagtttgataggaaatattaaaaatcttaaagcttttaaaaattatttgatttataatttatataaaatttacttgactattttcagtgccatattataaaatttatttaatggaatacacttaaagacagataagaaagccagtatgagtcacaggttataatttttatatattcccatacatataatcaaagaacttcatgtaattcagtgttgaatctcactgaaattcatgcttaaagcatgctgctatatagaatctctccacaataagcaggaaaagtcattttcttttctttttccttttcttttcttttttttttttttgagacagggtctcgctctgtcatccagtggtgcaatcacagctcactgcaacttcaatctcctggggcccaagcgatcctcccaccccagcctcctgagtagctgggactataggtgcatgccacatacctggctaattaacattttttttgtagagatggggtctcactatgttgcctaggctggtcttgaactcctgggctcaactgatagtcctgcctcggcctcccaaagtgatggggttacaggtgtaagccccattttctaaattaggcaccaatggggcatctctttcaatcttatttgccatgcatttctgtacttcagtgtatcctgtaataaggttacagcgaataatgacgactatactataacaactaatatactatgacttgctgcatgatgtacttggtgctaagtgcttaatgatacattttcacaagtattttatagctacaaaaacagttcttttataatctgtattttacagaggatacaactaaagctcagtaaagtaaaatgattgccaaaaaccgcacagctaagtaagtgatgtagacagaatgtgaaaccatgtatattctgattctagagtgtctactcttaatcactgcattatctttccagatactataaatataataatagtaacagtaacagtaagtaagtggagaagccagacttccaacccagggttgttagactccaaagtctgttttattttttttaaactaccatatgatactttctgaacagttaagctgtaataaatgaattagaacagtgagttattgagacttttatagacaaagtaagaggtcttagtctctgattttgagagtttttaaaatcttatagtagaatcagagaaaaatccaagatgaaaaccagcatatattttcctaattaaatatcatgtaataactttctttgactctttacagaagagtcaataaggaaaaaaaaaagtattttttctgcagttggcttaccaaataaaagagccagtttttgccaaaggtgaaattactaaggttaaaaaataaattaaaagagccagttttgcatccctattttcaataatctttaaaattgcttttggaagtattattaagttgttttgggaaatattcatatttccagatttttttctctttgcttgggcagttaaaatggtattcgagaacagagccagataagattcagatgccctttaatcttgagttttgccttactctatgagttttataaagcggtattggtaacgccttccttcccctcatttagaacaatgagacagcacagagaccttacgtggttaaagctatcttctatttcctttctttcttttctttctctctctttttctctttctttccctccctccctccctctctctctctcttttttttttttttgacagagtttcgctcttgttgcccaggctggagtgcaatggcacaatcccgactcaccgcaacctgcgcctcccgggttcaagcgattctcctgcctcagcctcctgagtagctgggattataggcatgcgccactatgcctggctaattttgtatttttagtagacacggagtttctctatgttggtaggctggtcttgaactcccaacctcaggtgatccgcccccctcggcctccgaaagtgctgggattacaggcatgagccaccgcacccgaccttctttttctttttttttttttttgagacagagtctcactctgttgtccaggctggagtgcagtggtgtgatcggctcactgcagcctctgcctcccaggttcaagttattctcatgcctcagccacctgactagctgggattacagacacatgccaccatgccccactgatttttgcgtttttagtagagatggcattttgccatgtttcccaggctggtcccaaattcctggcctcaagtgatccacccgccttggcctcccaaactgctgggaatacagatgtgagccactgagcccagccatttctttattcagactgtacagctgccactgtgatactggggactaagcaatcttagactgagtgttaagaattttagtattggccgggtgcggtggctcacgcctgtaatcctagcactttgggaggccgaggcgggcggatcacaaagtcaggagatggagaccatcctggctaacatggtaaaatcctgtctctactaaaaatacaaaaaaattagccaggcgtggtggcatgcgcctgtagtcccagctgctggggaggctgaagcaggagaatggtgtgaacctgggaggcagagcttgcagtgagccaagatcgtgccactgcactccagcctgggtgacaaagcaagactccgtctcaaaaaaaaaaaaaaaaaaaaaaaagaattttagtattgctagtcataattctttgacttttcctcctatttcccacctcttttaggtggaggttccagtttactaaatggaaacatttcttctgagaggatctgttccctggatctacttaaaaagctcagggttaaatgagaaggacctaacccttctcatatagcccaccaaggcttgtatcaagaacattagattacttccatgattgcttttaattctgacagtccatgaaatggtcataaggtatgggttgataaggacatggttctctagtattacagttcaccctaatatgttttaaattctcatttctaaggttaagtactaaccaatctgctaatttcctcttgtctatctggtgcagatcttgctgttgccttgatcatagtggaagtctgattgtctgttagcttcttgatacatcgttgccctgccacaatattacagacctacaaatggaaaaaagttttgtactacatgtatatatcttttttttttagctcttacttagtgccaattacatgtaaataaaaatttaaaatcaacttcattaaaccacttattttcaatatgttaagtaaaaaagtagtaaacaagacagctctacagtaattaagtataattaagtaaaatgtacaccagatgaagactgaaagaagtatagtataccaaaatgttaacagtggttacattagagtggtaggattatggatgaacttgtttcgt

SEQ ID NO: 669 - DNA, 643 bp, Homo sapiens; identical to SEQ ID NO: 664

SEQ ID NO: 670 - DNA, 605 bp, Homo sapiens
aatactgagttttgagtggatgatgtaagtgtttatagttcaggagatgaattgaattgtgttcccctaaaattcatatgtcgaatctctaatccccagtacttcatatgtgactatatttgagcttaaggccttgaaacagtgattaagttaaaatgaagtctttagggtgggccttaatgtaatctgaatggtgttcttataagaagaagaaatctgggcacacctaaaggcagtggacttaagcatggagaaataagggaccatgtcaggacacaatgaggggacagctatcacaagccaaagagacaggccctgggagagcccaaccctggcaacacgttgattttagacttccagcctccagatctttttgagaaaataaatttctgttgtttaagccactcattatacagtattttgttatggcagcccaagctgactaatttattgatttatttattcaacgaatattcaccacaattctccactttactccagatacattcctagtgccttagcatgcacggttggataaagtgaagcgtcctggaaattatgaattgtctgtagaatgttactaccatggatgaaaagaacagagt

SEQ ID NO: 671 - DNA, 605 bp, Homo sapiens; identical to SEQ ID NO: 670

SEQ ID NO: 672 - DNA, 639 bp, Homo sapiens
gtgaaactgctaaaaaaagaattcttaaaaaaatttcaaaacttatttacccccaaacatagcaagtaatgacaatatatatttatcactttctaagagttaggaatctgacaatgacttagatgggtgattctggctcaggatcccttatgaggctgcattcaagctgctggctggggctgcagtcttctgagggcttgtctggggtaggaggacccatgtgtaaggtggctgtgaagaagaagccccagttttttgccacatgagcctctcactaggttacttatgacatggcagctagttttccccagaccatgtgctacaagagagaaagagagtaagcaagctggaagctgtcctgtgttttacaatctgattttggaagtggtatttcatcacttctgctgtattctgttggtcagtgtgggaaaggactgtatagaggtatgaataataggaggctatctgtgagccttcctggaagttggctatcacactttctacaattttaatactttttcttggttgagaattgggaaaaacatcttccatgaattgtctttttgggcaccttttgcccgcttcttccatgataatatttaaaggttatctaatttgatcattctcttgttagcttag

SEQ ID NO: 673 - DNA, 639 bp, Homo sapiens; identical to SEQ ID NO: 672

SEQ ID NO: 674 - DNA, 769 bp, Homo sapiens
ggagaagggacatacatttggtaagtgtaaataagagtctttgctgattaattcagtgtggcccatgagaaagagtggaagtgtccaaggttccctcaggtttacagcttgggcaactgactgagaacagaaaggagctgccattgagaggaagaaaagaaaatgacactgagtccatgttgggacacattgggtttaaagggatatcattatgacctaagctctctgaattccagtgactgggaatatgggaagatacatctttaacagttgaagcaatttatacactttaacaattgaagcaatttatacaccagagcctaaggaatatttatagatgagggctgtgctgcaatgacagatagggttgtatgaaacatacactaatctgaccattctatcctccagactcagggaaggaaataataaaagtaagtaaccataaaaaatagacttttatgcataaataaataaaaatcagctaggagacagttcatccctgtataagtaaaacaggcaaatttatctttcctctgattaataatttaagaaaaaatcccaagcaagctgcctatggaggtgtaggagtagctcctataattagactccaatttgaaccatgagggtgaggatcagaaagctgactcagagcctggtgtcaattatttgcagtttgtacaacgaaaggctaaaaatttgggagatgcaggatgactgaagcccgattctgggggttgttacaagcacagttacagggtaagttttttcc

SEQ ID NO: 675 - DNA, 768 bp, Homo sapiens
ggagaagggacatacatttggtaagtgtaaataagagtctttgctgattaattcagtgtggcccatgagaaagagtggaagtgtccaaggttccctcaggtttacagcttgggcaactgactgagaacagaaaggagctgccattgagaggaagaaaagaaaatgacactgagtccatgttgggacacattgggtttaaagggatatcattatgacctaagctctctgaattccagtgactgggaatatgggaagatacatctttaacagttgaagcaatttatacactttaacaattgaagcaatttatacaccagagcctaaggaatatttatagatgagggctgtgctgcaatgacagatagggttgtatgaaacatacactaatctgaccattctatcctccagactcagggaaggaaataataaaagtaagtaaccataaaaaatagacttttatgcataaataaataaaaatcagctaggagacagttcatccctgtataagtaaaacaggcaaatttatctttcctctgattaataatttaagaaaaaatcccaagcaagctgcctatggaggtgtaggagtagctcctataattagactccaatttgaaccatgagggtgaggatcagaaagctgactcagagcctggtgtcaattatttgcagtttgtacaacgaaaggctaaaaatttgggagatgcaggatgactgaagcccgattctgggggttgttacagcacagttacagggtaagttttttcc

SEQ ID NO: 676 - DNA, 768 bp, Homo sapiens; identical to SEQ ID NO: 675

SEQ ID NO: 677 - DNA, 1446 bp, Homo sapiens
cagcctcctctggatcttttctggttccttcgctcctagaactgtgtctgatggcttatgaaggcaaatgacaaatgtttgccatatgcacatgtatgtgcatgaatgaatacatccaggttctgacttcctcggggcaacctctactttctcaatgcccctcttaagatgggggtgggggagggtcctcctagaactgaacatgatattccaggtgtgatctaatacatttaaatgtccaaaagctctttcttccctaaacgttcctttttaaaagctactgttctcaattaatgggtgtctcatcttcttaagtatattaataagaggtattttgatgtttccctccattctgtggattacctcttgattctctggattctttgtgattccgttttgttttaaggatgtcctcaggtgtctggtgatccttgcttataagtccaaattaatgatgaggcactaaaatgctgattggaagctctctgtgcaggcaggtattgttgaatagtggtaaacaggggacatgttcattttggagacactcaaatatcaggacctataaatctctatgccaagtcagtttccccagagtctcttaatatcatttctttcaggttaaaagcctggttaccaggttctgggagtgaagggaggagtggggcttagacaagggtgggggcgggggtatgtctcacaattcactaaataccttcttttatatatgtgttctctgtgcagcattttacccccaccatcgtccatgtctgatgcctcaggttcaatcttgttcagtctttccaaagaggaaacattggttgggtgggaatgattggcaggtcgaagagagaatttgaagctatagctgctccttttaaaacttctaactcatctttgttttttcaggccttcctcacacccatgtcttcagatacccaaggcctttaatacccaagtccttccaggattctgcacatctcattagcttcatattcccgtaagtacttgggtttctgctttctcagctctgatgtgtcattttctaatcaatcatcagcattccagcttccaaagttttgttcatatatcttacatgtgttgtcttgaccgacttctttttggaccttagattatttacctatttaaattccttaattgttactttagtggagttttggaagggaacaaaaatataggcaggtgtttatcacatttaacaaggaactcaaaatttatatttaattctatttaatctggctgccttcttgccatcagtctatttgaaaagttcatatggacccagctctgtcatcatcacatgttctatatccccaaaccttgtgacatctgcaaagaagtacagaagacctcaagagaagataagctagaatttatttatttttataccttttattcagtttttattaaagctttcctacctttcca

SEQ ID NO: 678 - DNA, 409 bp, Homo sapiens
catattaatattgcgagtattttgtgttatgcagccagaaaaatcacataatgggaacttacccacagcccccaaactcataaacaggagctgaatagaaattcctcagtgcaatttatggtaacaatttcatgctcagtttagttacttccatgactcagaaaagaaatttcttttgcttatttcagtaatttttttctaaaaaattgttcccctaatttttggcaaaggatctatgagaaagtgaagaactccctggttgtacatggatttggaattgtcacttaagtgaggccaaaatgtaaccctatgccattcattgcatagtaccatttgttataaatttgacctctaaaacaaagatattacaaagccattgagtgtttttttaagggatatattatatttg

SEQ ID NO: 679 - DNA, 409 bp, Homo sapiens; identical to SEQ ID NO: 678

SEQ ID NO: 680 - DNA, 1446 bp, Homo sapiens
cagcctcctctggatcttttctggttccttcgctcctagaactgtgtctgatggcttatgaaggcaaatgacaaatgtttgccatatgcacatgtatgtgcatgaatgaatacatccaggttctgacttcctcggggcaacctctactttctcaatgcccctcttaagatgggggtgggggagggtcctcctagaactgaacatgatattccaggtgtgatctaatacatttaaatgtccaaaagctctttcttccctaaacgttcctttttaaaagctactgttctcaattaatgggtgtctcatcttcttaagtatattaataagaggtattttgatgtttccctccattctgtggattacctcttgattctctggattctttgtgattccgttttgttttaaggatgttctcaggtgtctggtgatccttgcttataagtccaaattaatgatgaggcactaaaatgctgattggaagctctctgtgcaggcaggtattgttgaatagtggtaaacaggggacatgttcattttggagacactcaaatatcaggacctataaatctctatgccaagtcagtttccccagagtctcttaatatcatttctttcaggttaaaagcctggttaccaggttctgggagtgaagggaggagtggggcttagacaagggtgggggcgggggtatgtctcacaattcactaaataccttcttttatatatgtgttctctgtgcagcattttacccccaccatcgtccatgtctgatgcctcaggttcaatcttgttcagtctttccaaagaggaaacattggttgggtgggaatgattggcaggtcgaagagagaatttgaagctatagctgctccttttaaaacttctaactcatctttgttttttcaggccttcctcacacccatgtcttcagatacccaaggcctttaatacccaagtccttccaggattctgcacatctcattagcttcatattcccgtaagtacttgggtttctgctttctcagctctgatgtgtcattttctaatcaatcatcagcattccagcttccaaagttttgttcatatatcttacatgtgttgtcttgaccgacttctttttggaccttagattatttacctatttaaattccttaattgttactttagtggagttttggaagggaacaaaaatataggcaggtgtttatcacatttaacaaggaactcaaaatttatatttaattctatttaatctggctgccttcttgccatcagtctatttgaaaagttcatatggacccagctctgtcatcatcacatgttctatatccccaaaccttgtgacatctgcaaagaagtacagaagacctcaagagaagataagctagaatttatttatttttataccttttattcagtttttattaaagctttcctacctttcca

SEQ ID NO: 681 - DNA, 409 bp, Homo sapiens; identical to SEQ ID NO: 678

SEQ ID NO: 682 - DNA, 1446 bp, Homo sapiens; identical to SEQ ID NO: 680

SEQ ID NO: 683 - DNA, 263 bp, Homo sapiens
ggcaatgagtaatgctcagttgaacaaaaatctgaaagatagaggcataagtgataagaaattgaatggcaatgtgaaaacccttgatctgtttacaaatgatagtttcgaaaaaggaatgtgtctgtcatagggttgacttaggtcaggggttctaaactaggggccacttttcaacctccttccctcagagatatttggcaatatctagagacatttttggttgtcgtaatgggttggggagcagacttaatacattctta

SEQ ID NO: 684 - DNA, 263 bp, Homo sapiens
ggcaatgagtaatgctcagttgaacaaaaatttgaaagatagaggcataagtgataagaaattgaatggcaatgtgaaaacccttgatctgtttacaaatgatagtttcgaaaaaggaatgtgtctgtcatagggttgacttaggtcaggggttctaaactaggggccacttttcaacctccttccctcagagatatttggcaatatctagagacatttttggttgtcgtaatgggttggggagcagacttaatacattctta

SEQ ID NO: 685 - DNA, 263 bp, Homo sapiens; identical to SEQ ID NO: 683

SEQ ID NO: 686 - DNA, 186 bp, Homo sapiens
aaagtagcttctccggtggcgggcgcctgtagtcccagctacttgggaggctgaggcaggagaatggcgtgaacccgggaagcggagcttgcagtgagccgagattgcgccactgcagtccgcagtccggcctgggcgacagagcgagactccgtctcaaaaaaaaaaaaaaaaaaaaaaaagaaa

SEQ ID NO: 687 - DNA, 180 bp, Homo sapiens
aaagtagcttctccggtggcgggcgcctgtagtcccagctacttgggaggctgaggcaggagaatggcgtgaacccgggaagcggagcttgcagtgagccgagattgcgccactgcagtccgcagtccggcctgggcgacagagcgagactccgtctcaaaaaaaaaaaaaaaaaaaaaa

SEQ ID NO: 688 - DNA, 607 bp, Homo sapiens
gtatttagctggggaataagatgtccatagggctttgaaaaacgctaacatattcctgagactgtagaaggtgcttagggtgtgcatatgtctagggttatgtgaacactcaagataggcctgagaaggccctgagctctaacctctgggtgaccttgaggcactacagaagcaagaagtgaaggctaaggcagaattatttggttggttggtgcaaaaaattgcggttttgtcatttcaacgaaattactttggtaccaacctaatgtaaagtgcttggctgattgttgaaggcttgtcccaacgtaagtactaaacccctcaggaaagactgggagattttttggttgaaggtgtttaagaaaacctgtctctctaatcattagttgaccactaagctaactgagcagaaacctgagtggtcacacacaataaacaatgcagactttaaagaattcattcataagctaggtgcggtggcacacgtgtagtcccagctactcggtaaactaaggccagaggatcccttgagtcaccaactcagaccctatctctaaaaaaaaaaaaaaagaatgagttcagaaaagtcactaaatcaacaactgct

SEQ ID NO: 689 - DNA, 465 bp, Homo sapiens
gctcaaccccagatttgagcagggagaaaaaaaaaatcagcaaacttcaatataggtcagttgagatgatctagtctgggcaacagattgaaaagagaaagaagaaacatcaacaggcctcaaagtcctgtgggacacaatcaagcacaccaacgtgcgcgtaatgggagtttcagaaggagaggagaaaaagaaaagggcaggcataatacttgaataaaagaatggccaaaaacttcctaaatttaatgagaaatatttatcgacacatccaagaagcttaacaaatgccaagtgacataaacaaatccacacctcaacacattgtaattaaccgattaaaagtcaagggcaaagagagactcttgaaagtggccactttcaagaagaaaagccacaaagagagaagccactcatcacataatcctccataagatttacagttgatgccatgaaagccaaaag

SEQ ID NO: 690 - DNA, 475 bp, Homo sapiens
ttctaaatactccccactttggccttaactcagaccttcctcacttcttttttattttattttattttatatgtatttatttattaatgcatttttgagttagggtcttgctttgtcacgcaggctggagtgcagtggcgccatctgggctcactgcaacatcccgtccccgggctcaggcaaccctcccacttcagcctcctaggtagctagggctacaggcgcttgccaccatgcccagttaatttttatttatgtttttatttattttatttttttagtagagacaggatttcaccatgttccccaggctacttttttagaatgctctttgatctttccgccttcggtctgattccttttaatccattctccacctcactggtaaaaatttttgtgctatatgtagtcatgctccttctttatttaaaattccactagtggctccccataacattcattataaaggtcaaaa

SEQ ID NO: 691 - DNA, 711 bp, Homo sapiens
ggcgtggtggggggtgcctgtaatcccagctactcgggaggctgaggcaggagaatggcttgaaccccggaggcggaggttgcagtgagctgagatcgcgccactgcactccaccctgggcaaaaagagcaaagctccgtctcaaaaaaaagtttcccaggagattctaatgtgcaactggagttgagaacctgtattttggaggcttacaaagcttttaataaaactgtgtggctgtgtctagatatccatgttaggttgggagtgaatttctgcatgaagaaaagacatctatttgggtggtgatgaaaatggttcccccccagaatcctgtcttttataacaatatgattagtaataataatatgactaatatgattagtaatatgattagtaataatatgactaatatgattagtaatatgattagttataatatgattatattactaatcatattgttaataatactaactatcagttatggaatagttatattaggctctgggctaatctccatattagcactatatataaacactattattattctaaattttataaataaggaaactgaggtgtagtaacatcacgtgtaatttcctcacgatcacacagctgtctgactccaaagctcatcctattcatcactcctccaagatgattaatttccatttaaataagcgaaaatgtggattaaagaatgagaag

SEQ ID NO: 692 - DNA, 633 bp, Homo sapiens
ggttgtggtgagctgagatcgcgccactgcactccaccctgggcaaaaagagcaaagctccgtctcaaaaaaaagtttcccaggagattctaatgtgcaactggagttgagaacctgtattttggaggcttacaaagcttttaataaaactgtgtggctgtgtctagatatccatgttaggttttgagtgaatttctgcatgaagaaaagacatctatttgggtggtgatgttgatggttggggcagtggatcctgtcttttataacaatatgattagtaataataatatgactaatatgattagtaatatgattagtaataatatgactaatatgattagtaatatgattagttataatatgattatattactaatcatattgttaataatactaactatcagttatggaatagttatattaggctctgggctaatctccatattagcactatatataaacactattattattctaaattttataaataaggaaactgaggtgtagtaacatcacgtgtaatttcctcacgatcacacagctgtctgactccaaagctcatcctattcatcactcctccaagatgattaatttccatttaaataaggaaaatgtggattaaagaatgagaag

SEQ ID NO: 693 - DNA, 368 bp, Homo sapiens
ggaaattcaagtctaaccctggagggacccctgtttagtcatctgtctagacagacgagttcatataatgggcctctatgtttcttttgctttgtataacagacggtggtcccttcctttaaactttgtgaagatgtcaacctttggttttttttatcccaacctgctgttgataagccaagaaagtgactcacacatgagccaacaataactcttgagtgtgacaattagtcttacaattgagtagcaagaaaatataggatttgcatacaggggacctgggtaaaatcctgactgtgtaacatcgagaaagtcagttaccctttctgaacttttttttttttcctaaaatgagagttaattaaaaa

SEQ ID NO: 694 - DNA, 1365 bp, Homo sapiens
aaagagtgaagaatcaaatagatacaataaaaaatgataaaggggatatcaccacctatcccacaaaaatacaaactaccatcagagaatactataaacacgtctatgcaaataaactagaaaatcctgaagaaatggataaattcctggacacatacaccctcccaagactaaaccaggaagaagttgaatctctgaacagaccaataacaggttctgaaattgaggcaataatagcctacccaccaaagaaagtccaggaccagacggattcataccagaattctactagaggtacaaagaggagctggtaccattccttctgaaaatattccaatcaatagaaaaagaaggaatcctccctaactcattttatgaggccagcatcatcctgataccaaagccttgcagagacacacaaaaaaagaaaattttggaccaatatccctgatgaacatcaatgtgaaaatcctcaataaaatattggcaaatggaatccagcagcacatcagaaagcttatccaccacaatcaagtcgacttcatccctgggatgcaaggctggctcaatatatgctaatcaataaacgtaatccagcacataaacagaaccaacaacaaaaaccacatgattatctcaatagatgcagaaaaggcctttgacaaaattcaacagcacttcatgctaaaaactctcaataaattaggtattgatgggacgtatctcaaaataataagagctatctgtgacaaacccactgccaatatcatactgaatgggcaaaaactggaagcgttccctttgaaaactggcacaagacgggtgccctctctcaccactcctattcaacatagtgttggaagtcctggccagggcaatcaggcaggagaagaaaataaagggtattcagttaggaaaagaggaagtcaaattgtctctgtttgcagatgacatgattgtatatctagaaaaccccatcatctcagcccaaaatctccttaagctgataagcaacttcagcaaagtctcaggatacaaaatcgatgtgcaaaatcacaagcattcttatacaccaataacagacagagagccaaatcatgagtgacctcccattcacaattgcttcaaagagaataaaatacctaggaatccaacttacaagggatgtgaaggacctcttcaaggagaactacaaaccactgctcaatgaaataaaaggatacaaacaaatggaagaacattccatgctcatggataggaagaatcaatatcgtgaaaatggccatagagcccaaggtaatttatagattcaatgccatccccatcaagctaccaatgactttcttcacagaactgcagaaaact

SEQ ID NO: 695 - DNA, 961 bp, Homo sapiens
ggaatattgtcatagtgcagaaatgtgtatagtaagacactttatcattgagtctctagcaaaaatcatcctaaaagtatgttccttagaactatacatagcaataaacatgttttctagctatagctctgtcttggtcatcctcattccctctctgatctttccccttgctttactaaataatttattaagcaatctttaattgtagtacaaaccacatctttgtcattctttggatgtagtgtcacaaaaatatcccagtccacatcagttacacccatagataagcttacagacagaggtaagaagggagcagtgagtggggtgcaagcattggcaatattgatgggcatcctctgtcctgtactgatgacctgaggttctggacattgggaattatagcacagactcaaaataaaacatttttttgccactgtgaaaaagtgtgttgattttgtaaattaatacaaattcttcaaagacatattcagaaaaaaattccatgatgtacatgtttaagtgaaggataactgtatgtccttacatagtgctgaaatatgtagaacattatagagctcatggatataaaatttgatgttgaacattatacagtcttcttaaatgcacatcttgctgtttaatgattgtgttaaaaattgctggccaggcacagtggctcacgcctgtaatcccagcacttggggaggctgaggcgggcggatcacgaggtcaggagatcgagaccatcctggttaacacgatgaaaccccgtctgtactaaaaatacaaaaaaaatagccgggcgtggtggtgggcgcctgtagtcccagctactcgggatgctgaggcaggagaatggcgtgaaccagggaggcggaggttgcagtgagccgagatcgcgccaccgcactccagcctaggcgacagagcaagacgccatctcaaaaaaaaaaaaaaattt

SEQ ID NO: 696 - DNA, 344 bp, Homo sapiens
agccatccctgctacctcccagaagtttcatgcctttgaacctctctcaggcctgggtggccaagataacaagggggcttaggtagaagaaacaattttttccttggtgttacctggggctcataagaagaaagagtctcattacctgcttctatgcacaattagatgtcatgtagtcacagatgcctccttatgaactgcctgtagttttccacacttcagtgggacctatcacaccatagggcctgtgtttgcatgttgacatcaagaggtgggtgacgggacctaccggtataggaattcaacaatgcaaagttcatgcttcaggcagttcagcatatgat

SEQ ID NO: 697 - DNA, 427 bp, Homo sapiens
ggcacatgtatacctacgtaacaaacctgcaggttctgcacatgtaccccagaacttaaagtaaaataaaaaaaatgctgttagtcctctaatatatattgcatccaaaggtgagcagcaaaagcattataagatacaaataaaattaagaaaataataagtggaaaatgctttatcaatacattagaaaatatttttattactcatttaaaactcaagttccaactttttcttttttcttctttttttattttttgtagaaatagggcctctctatattacccaggctggtctggaactcctaggctgagattacaagtgtgagccaccatacctggccacaacttaaatgtgaaaaaatggcaaaaatatggcacagtctgactatgtaacaagttaacattttacaggtagccttagatacagt

SEQ ID NO: 698 - DNA, 444 bp, Homo sapiens
ggctccaagactggtgagtaagcagtcggcgtcgggaatggggagtccttggaccagagcaaggcctgctcacctgaagaccccggcgtggcgaaggctgctaccgagacgacggcggcgggggtggtggcggcggcgcccactcacgagctcacactcattccctctcccggggccccggccccgccctccccaatacagccagtcggcgggcgccttggaaagtttccggccctccaggaggcttcctggctcttgattggccagtgtgaacagactgtagagaccggcggtcacgtgacgctgaagattcccgcttcttaaagcaacctctcttgctacgtttgcgagtaggtgtgtattgttttaacacacgtttaataagcatattttattttttttaccaccacaatagtaacgaggaaataaacagtctcaaagaca

SEQ ID NO: 699 - DNA, 444 bp, Homo sapiens
ggctccaagactggtgagtaagcagtcggcgtcgggaatggggagtccttggaccagagcaaggcctgctcacctgaagaccccggcgtggcgaaggctgctaccgagacgacggcggcgggggtggtggcggcggcgcccactcacgagctcacactcattccctctcccggggccccggccccgccctccccaatacagccagtcggcgggcgccttggaaagtttccggccctccaggaggcttcctggctcttcattggccagtgtgaacagactgtagagaccggcggtcacgtgacgctgaagattcccgcttcttaaagcaacctctcttgctacgtttgcgagtaggtgtgtattgttttaacacacgtttaataagcatattttattttttttaccaccacaatagtaacgaggaaataaacagtctcaaagaca

SEQ ID NO: 700 - DNA, 1290 bp, Homo sapiens
ccgggtgtgttggcacatgcctgtaatcccagctactcgggaggctgaggcaggagaattgcttgaacccgggaggcggaggttgtggtgagccgagatcgcgccactgcactccaacctggccaacaagagtgaatctccgtctcaaaaaaaagagagaaactttctttccctcacatgtcacaaggcatacagtgaattcctttaagttcacccaagatggggtagtttgcactgagtgaactgtgggaacattctgcaagggagcatgaatgtacacattttttctctttccccctctcagggttagatgctgctgccgctggaaaagaaaatcccctgggacccgagctggcaaagccagatggatgcgactgtggttgccatggcaaccccacctaaggagaatgtgaccctgctgagtctcttccactcatattcagaaccatattagaagtggtttcaagtgtctgcccacctgtgcgttaagggaaagagagagggcgctctcctctaaggtctgactgagcctgaagtcagcttagccagacctgggcagctggctgacctccttgcttaggtttactgttctggacagccatcagcaaccttggagacactagaagatgggagggagaccgggactgcccgggacctattagatgtagtgaacctgtatccaacctgtctggagctcatttgctcccaatctgagtggaggcaggaaccagggaaggcagtagtgagacctccatggccacagatgggagaaaggtggctcgctccacacacccaatgcctggcaagaactatgatggctttggtgtcagactttttttcttttttcctttttttgagacggagtaacaccctgttgcccaggctggagtgcagtggcgcaatcttggctcactacaacctccacctcccaggttcaaatgattctcctgcctcaacctcccaagtagctgggattacaggcacttgccactaccaccagctaatttttgtgtttttagtagagacagggttttcaccatgttggctaggctggtctccaactcctgaccttgtgatccacccgcctctgcctcccaaagtgctgggattacaggcatgagccactgtgcctggtcaaagtcagactgtttttattcatttatttttatttttatttattttttgaaactgagtctcgctctgtcgcccaggttggagtgcagtggcgtgatagctcactgcaacctctgccctcccagtttcaagtgattctcctgccttagcctctgg

SEQ ID NO: 701 - DNA, 6305 bp, Homo sapiens
tttttagtgaagaatcaccttaaaacttggaacctggatacaagataattgcttcattctggaaaagtttagtagcaaactatatgccaggactgtgataattactagggatacatgattgaatatatagtataagatgccttggagtgtcagtttcatataaatggctcatgcagtatatagacagtgtggtaaaaagagactactgagatgtgcagaggacagaaaatgaagggtctttgaatggtagataaatgtgttcggacttttcactcagggctgttgaagtttttgaaggtcagtggtcttagagttttggtgttttcaagccctgctaagtactttgtttctagctgatgattggccaccattactgatcatctattggctctgtctgattcagcaatcccaccgctgagtatttatgcaaaggaaaaaaatcaatgtatcagaaagataactgtacttttatatttgttgcaacactattaacagtagcacagatataaaatcaacctaaatgtccatcaacaaatgattggaaaaagaaaatgtagaaaatatacacaatgaaatactattcaggcgtaaaaaacagtagaatcataatttttgcagacacatggatggaactggaggccattgttgtaagtgaagcaaaccagacacagagtaaacatcgtattttatcactcataagtgggtgctaaaagatgtgagggtattgatgtagagagtggaatgataaaggagactcagcagggtgaggggatggaaggggtgaatagtgagaaatttcttaatgggtacaatgtgcattattctggtgatggatacctgaaagccctgacttcaccactatgccatccatgcttacagcaaaattgcacttggagaccaaaaatttatacaaaaaaagtcttagacctctctcttttctctcataagcctcagagctcagtgatccccttggatctcctcagcctgctgagttttaactttcctacctaaggtgattttgggcagagacaagggagtgtttcaggaagacgttttcaggcatacgcttctaaagaaacattggagactctcctagtggcttttatctagtcactgctttaagcaaggaataaaacatctgtggctaaaattttaaaaactatgtttcccatccaccctttagacctgacagaagagattttaggattttaagggaacagctttttcctgacccaaaagggcacagtagtgcaaagaccaatgtcacgtaggtaccttttccccatctgtaaaataactttcccatactattcccacagctggaatcagtacaatgttttgactgaggtattggaaaagcctatgagctcattatcatttgaacgtatgagtaatgtaaaatttggtagaactttatttgaaaggattatttatgccatttttagttaactgatttatattacggttatttcaaacaataaaatcaggttgttatgtcgtaagctagaaaaatttacaatgacacaaggtcttcattatctcacatgatgaattgaagattaaagcaaaataatttagggaattctgtgacagtttctgtttcatgttgtttaataatgacttcaaactgttgtatatatatggagaactcctgactaaagagaatttttttgtctattgtgctatgtttctgtaactttttaagatctagaggaacacatatttagtctcagttggccaactaaatgttatggagtcagcttctgtgttatgtgctgtgcattgaagggatggtggagacaaggctgctgacctcgcagagtctgcggagaaaacctgatggagcgtggcagggaacatgctgggagcatcccaggatgccaaaagtgcacacagagggaacacctgccttagaagtggggagggtcagacaaggagagttgtcaggaaaaacgaggaaaatttaatctgcaggaatagaaacacacttgagaaatccatgtggaatgaaaagagaatggctgagcagcagcagattgtcaaaaaggaaatcaagaaggagcagccaaagaggtggatggagaaccacgagaaagaaggtgacactgaagccaagggaaagaaagtgtttcaacatttctgggaaaaaaaatgacattctccgtcttaaccttgttattttatgagtcatatagccacattccaggttctgagaagtccagcactaaagatgtttcttttagtttgcttaacccagcatttgcgggaataatctgagctcagtgtgagtgtgtgtgcgtgtgtgtgtgtgtgtgcgcctgtgtgttccactaatatctctctggggttagtgctctatacaacataatttttaaaacactggttttatccatcttattatgttcagctgcagcaatacttacaaaggtcaactttgattatgtgtcttagttactaaagaaaacaaaacaaactaatgaataaagcccacctggcagtggctcctcactacctgtacgatggagcccacctggcttggcctgcgtgccctgtgccgacctggccatgctgtcttctgcctgttgctttgcctcccctttcctcctggagaaggtagagatgctctgagatttggcccgtctggaacatgtgtccttctcctcatgtggaccatgttttcctgagtccactttaatcttgtttaagggtatagaactttacttaaagcttctggtcaggtctcactctgtatgctgtcttcctgccacttctactatgtacatatttaactgatacattaattatgctatatcagccaagggttttacttctatatcattttatatcatcatctttttttcttagagcttagttcacttatttattcagtctttccacactataattgtatgtcatataattttatatttattttcattggtgtttatatatcttttctgtaaaaatggaggctttctaaatagatcttcattaatgttgagagaacaaggttttaagtcgtggtctcagccaaaaggagttccccgcactaccaggagggaaagaagcacttgcattgttgcattagatgttcttacagagaaagagaaccatgtgtaatggaaaattgctaactatgcctcagggggaccaggttgattcggtgagaaagtttctattggtttagaaagcatagttctgagttttctaggagaaggagaaaaattagagtagggcataagaagtaatgcccatatcaaaaagttagaaagatctcaaattaacaacctaacatcacaactgaaagaattagagaagcaagaagaactcaaccataaagcttatagaagacaagaaataactgcaatcagagctgaactgaaagaaattgagacaagaaaaactgttcaaaagatcacttaatcaaggttttatgaaaaaaatactaagatagataaggcactagctagactaataaagaagaaaagagaaaagattcaaataaacaaaattagaaatgatgaagggaatgttaccactgaccccagagaaataaaaataacaaccagcaactactgtgaacacctctacacacacaaactagaaaccccagaagagacgaataaattcctggacacatacactctcttaagactgagccaggaagaaatttagtctctgaacagaccaattatgagctccaaaaattgaatccataataaatagcctaccaacccctcgaaaaagcccaggacctgatagattaacaaattttaacagatgtacaaagaagagccactactagtcctactaaaactatttcaagaaatacaggaggagggactcttccccaacttgttctacgagaccagaatcatcctgataccaaagcctggcagtgatacaacaaaaaaagaaaacttcaggccagtatccttgatgaacatccattcaataatctacaacaaaatacttgcaaaccgaatttagcaacacatcaaaaggctaattcaccatagtgaactaagcttcttccctggaatgaaaggttggtccatcatgggcaaatcaataaaatgtgatatgtaacataaataaaactaaagagaagaccacgtgattgtctcaacagatgcagaaaaggctttcagtaaaattcaacaaagcttcatgttaaaaattctcaataaatgaagtatcgaaggaacatacctcaaaataataaaggccacctatgacaaactcacagccaacattttactaaatgggcaaaatctggacgcattctccttgaaacccacacaagacaaggatgccctctctcaccactcctattcaacatagtattagaagtcctttctggagcaatcagacaagagaaagaaataaagcatatttaaatagaaagggaagtccaactatctctgtttgcagacaacataattctctatctaaaccctatagttgtgacccaaaagctctttaagcagataaacaacttccacaaagtttcaggacacaaaatcaatgtacagaatttgctagcattcctatataccaagaagagtcaaactaagagccaaatcagagaggcaattttattcacaatttccacaaaaagaataaaacatgtacgaatacagctaaccagggagttgaaaaatctctacaatgaaaattacaaaacactgctcaaagaagtcagagaagatacaaacaaaagaaaaaccattccatgttaatggagagaaagaattaatataatttaaatggtcgtactgccaaaagctattcctattaaaccagcaatgacatgattcatggaagtagaaaaaagctatttagaaattcatatagaaccaagaaagaacctaagtagccaaggcaatcctaagcaaaaagaacaaagcttgaggcatcacattacctgacttcaacctatactatagcactatagtaaccaaaacagcatggtactagtacaaaaacagacacatacaccaatggagcagaatagagaagttagaaataagaccacatacctacaactatctaatatttgacaaagctggcaaaaacaagcaatggggaaaagattccctattcaataaatgatactggaataactggctagccatatgcagaagattgaagttggacttcttccgtataccatacgcagaaatcaatccaagatgggttaaatacttaaatgtaaaacccaaaactataaaagccctggaaggcaagctaggcaataccattctggacatagaaagagacaaagatttcatgataaagacaccaaaaacaacaaatgcaactattgacaagtgagatctaattaaacttaaaagcttctgttcagcaaaagaaattatcaatagagtgaacaaacaacatatagaatgagaaaaaatatttacaaactatgtatctgacaaagatctaatattcaatataaggaacttaagtttacaagagaaaaacaaaaaaccctattaaaaagtggccaaagccctgacttctgaatggcacttctggacccagccagggactgagggatctcactgccctaaaggaaagaacacaggactctctggctttgccacctgctaattgtagagaccaaaggccttgagtgaacataggcagtcgtcagaaagtgcatgcagaagaacttgagcaagatccggtgctgtgctagtttcaggtctgatccagggcagtcatagtggtggtggccagcggtgcttgtgtctttcttctctctttctaagctttaggtggcttagaatagagagaaagactctgtatctttgagagaaaataagggtaaggaaaaagtctctggctagtaatccagaaaattctcctggatcttgttgaaggctgtcaaggtggtacttctctgagtctggaagaattaccgcattattgggtataaggtgccccataaagcagatatggcttagatcacaacacccaagtttttttcaaatatgtgaaaagccttcccaagaaagacagctacaaataagcacagacagtgaagactacaataaatactcacctatactctttttaaattttatttttttaaacctctcatatggtgctacatgcccaagattttaatgtccagacactgaagaacatctactagcatcaacactgtccaggaaaacatgacctcaccaagtgaactaaataaggtaccagggacaaatcctggagaaaaagagatatgtgacatttcagacagagaattcaaaatagctgtatttaaaaaaaactgaaagaaa

SEQ ID NO: 702 - DNA, 12100 bp, Homo sapiens
ctcaccctgcttatattccctgacatacataacagatgaagctcaggtgggcaatgcacctcaggccacagtgtggactgttgtaaccaagcgagttatagaggaatgccacactttgagacaaattaaggagtcctttattagccggtaaccgagaggcatgtaatgctcaaaattctcttggccccgaggaaggggctggttttgtttttataccgtggtctaaataggggaggggggagtttagctgaaacaagttttacagaagcagagctggcaaatagttaaaatattaattggttacaatagcagttacaaaacaaataaacagttccaggtgcaggggcttaaactatcacaaagagagaaatgcaggggttttgcgtgacattcaccgagtgcgtacccaggagcagctggtgcagcttgcctcaatatcttatcactaagtgcattcctggacctgctttgagtcagtttacactagttatgcaattaagggtggaaggtaaagggggctgcacgtgaagaaactaaaatggagtctgtccggctctctctccgctaggagagagtcactcaggttaaaacaaggtagggtatcacaggaccatgtacaattcttcaaactccagcttcaactctctttcttattgctctcttaggacagtatatttagatcagagtaaatgaaagtaatgttattaggagataagattaaaattgatcccatttgtaaaaagggaagtagattatttgtgaactgtaatacttttttttactgaagaatcaccttaaaacttggaacctggatacaagataattccttcattctgtaaaagtttagtagcaaactatatgccaggactgtgctaggtactagggatacatagttgaatatatagtacaagatgccttggagtgtcagatagtttcatataaatggctcatgcagtatatagacagtgtggtaaaaagagactactgagatgtgcagaggacagacaataaagcgtcttcgaatggtagataaatgtgtttggacttttcactcagggctgttgaagtttttgaaggtcagtggtctcagagttttggtgttttcaagccctgctaagcactttctttctagctgatgattggccaccattactgatcatctattggctctgtctgattcagcaatcccaccactgagtatttatgcaaaggaaaagaaatcaatgtatcagaaagataactgtacttgtgtatttgttgcaacactattcacagtagcacagacataaaatgaaactaaatacccatcaacaaatgattggagaaagaaaatgtagaaaatatacacaatgaaataccattcaggcataaaaaacaatagaattataacttttgcagacacatggatggaactggaggccattgttgtaagtgaagcaagccagacacagagtaaacatcatattgtatcactcataagcgggtgctaaaagatgtgtagatattgacgtagagagtggaatgataatggagactcagcagggtgaggggatggaaggggtgaacagtgagaaattacttaatgggtacaatgtgcattattctggtgatggatacctaaaagccctgacttcaccactatgccatccatgcttacagcaaaattacacttggaacccataaatttatacacaaaaagtcttagacctctctctcttctctcataagactcagagctcagtgatccccttggatccctcagcttgctgagttttgattttcctacctaaggtgattttgggcagagacaagggagtgtttatggaagatgttctcaggcacacgcttctaaagaaacattggagactattctagtggcctttatctagtcactgctttaagcaaggaataaaacatctgtggctaaaatttgtaaaactgtgtttcccacccacccttcagacctgacagaagagattttaggattttaagggaacagctttttcctgacctaaaagggcacagtagtgtaaaggccaatgtcaggtaagtacctgttccccatctgtaaaataactttcagatactattcccacagctggaatcagtacagtgttttgactgaggtattggaaaagcctatgagctcattatcatttgaacatatgagtaatgtaaaatttaggcagaattttatttgaaaggattatttatgcaatttttaattaactgatttatattgcggttatttcacacaataaaaatcaggtcgttgtgttgtaagctagaaatatttacaataacacatggtcttgattatctcacatgatgaagactaaagcaaaataatttatcttggggaattctgtgacagtttctctttcactttgctttaataatgacttcaaactgttgtacatatatagagaactcctgactaaagagaatattttgtctattgtgctatgtttctgtaactttttaagatctagaggaacatatatttagtctcagttggccaactaaatgttatggagtcagcttctgtgttatgtgctgagcattgaaggaatggtggagacaaggctgctgccctcacagagtctgcggagaaaacctgatggagtgtggcagggaacatgctgggagcatcccagggtgccaaaagcgcacacagatggaacacctgccttagaacaggggtgagtcagacaaggagaggtgtcaggaaaaacaaggaaagtttaaaatgcaggaatagaaacgcacttgagaaatccatggggaatgaaaagagaatggctgagcagcagcagattgtcaagaaggaaatcaagaaggatcagccaaagaggttgatggagaaccaggagaaagaaggtgacactgaagccaagggaaggaaagtgtttcagcatttctgggaaaaaatgacatgttctgtcttaaccttgctgttttatgagtcatatagcgacattccaggttctgagaagtccagcactaaagatgtttcttttagtttgcttaacccagcatttgccagaataatctgggcttagtgtgagtgtgtgtgtgtgtgtgtgtgcctgtgtgttctactaatatctcactgaggctagtgctctatacaacataatttttaaaacactggtcttatccatctttttgttcagctgcagcaacacttacaaaggtcaactttgatcatgtgtcttcgttactaaaagaaacaaaacaaactaatgaataaagcccacctggcagtgactcctcactacctgtatgatggagcccacctggcttggcctgggtgccctgtgctgacctggccgtgctgtcttctgcctgctgctttgcctcccctttcctcctggagaaggtagagatgctctgagctttggctcatctggaacatgtgtccttcccctcatgtggcccatgttttcctgagtccactttaatctcgtttaagggtatagaactttccttaaagcttttggtcaggtctcactctctatgctgtcttcctgccacttctacaatgtacatactttactgatacattaattatgctataccagcccaggtttttacttctatatcattttatatcatcatctttttttcttagagcttagttcacttatttattcagtctttccacaatataattgtatgtcatataatttcatattgattttcattggtgtttatatatcttttctgcaaaaatggaggctttctaaatagatcttcattaatgttgaaagaacaaggttttaagtcttggtctcagccaaaaggagttccccgcattaccaggagggaaagaaacacttgaattgttgcattagatattcttacagagaaagagaaccaagtgtaatggaaaattgctaacttggcctcagggagtccaggttgattcactgagaaagtttgaattggtttagaaagcatagttctgagttttctagaagaacaaaatttagagtagggcataagaagtaatgcccatatcaaaaaattagaaatatctcaaattaacaacctaacatcacaactgaaagaattagagaagcaaggagaactcaaccacaaagcttatagaagacaagaaataactaaaatcagagctgaattgaaagaaattgagacatgaaaaactgttcaaaagatcacttaatcaaggttttttgaaaaaattactaagatagggcactagctagattaataaagaagatgagagaagattcaaataaagaaaattagaaatgatgaagggaatgttaccactgaccccagagaaaaaaaaataacaaccagtaactactacgagcacctctatacacacaaactagaaaccctagaagagattaataaattcctggacacatatactctctcaagactgaaccaggaagaaattcagtctctgagcagaccaattatgagctccaaaaattgaatccgtaataaatagcctaccaacccccaaaaagcccaggacctgatagattaacaaattttaacagatgtacaaagaagagccagtaccagtcctactgaaactatttcaagaaatagaggaggagggactcttccccatcttgttctatgaggccagaatcatcctgataccaaagcctggcagtgacaaaacaaaaaaagaaaacttcaggccagtatccttgatgaacatccattcaatgatccacaacaaaatacttgcaaactgaatctagcaacacatcaaaaggctaattcaccatagtgaaataagcttcttccctggaatagaagggtggtccatcatgggcaaatcaataaaatgtgattcataacataaataaaactaaagataataaccacgtgattgtctcaacagatgcagaaaagactttcagtaaaattcaacaaagcttcaagttaaaaattctcaataaatgaggtatcaaaggaacatacctcaaaataataaaggccacctatgacaaactcacagccaacattatactaaatgggcaaaatcttgaagcatcctccttgaaacccgcacaagacaagcatgccctctctcaccactcctattcaacatagtattagaagtcctttctggagcaatcagacaagagaaagaaataaagcgtatttaaatagaaagagaagtccaactacctctgtttgcagacaacataattctgtatctaaaccctatagttgtgacccaaaactccttaagctgataaacaacttccacaaagtttcaggacacaaaatcaatgtacgaaatttgctagcattcctatacaccaagaagagccaaactaagagccaaatcagagaggcaattttattcacaatttccacaaaaagaataaagtacatacaaatacagctaaccagggaggtgaaaaatctctacaatgaaaattacaaaacactgctcaaagaagtcagagaagacacaaataaatgaaaaatcattccatcttaatggagagaaagaattaatatcatttaaatggttgtactgtccaaagctattcctattaaactaccaatgacatgcttcacagaagtagaaaaaagctatttaaaaattcatatagaaccaagaaagaacctaagtagccaaggcaatcctaagcaaaaagaacaaagcttgaggcatcacattacccgacttcaaactaacctacagcaccatagtaaccaaaacagcatggtactagtacaaaaacagacacatacaccagtggaacagaatagagaggttagaagtaagaccacatacctacaactaggtaatctttcacaaagctggcaaaaacaatcaatggggaaaagattccctattcaataaatggtgctgggataactggctagccatatgcagaagattgaagttggacttcttccttataccatatacaaaaatcaactcaaggtggattaaatacttaaatgtaaaacccaaaactataaaagctctggaagacaacctagacaataccatcctggacatagaaagaggcaaagatttcatgataaagacaccaaaaacaacaaatacaactattgacaagtgggatctaattaaacttaaaagcttctgctcagcaaaagaaattatcaatagagtgaacaacctatagaatgaggaaaaaatatttacaaactatgtatctgacaaagatctaatattcaatatgaggaacttaaatttacaagagaaaaacaaaaaacccctattaaaaagtggccaaagccctgacttctgaatagcacttctggacccagccagggactgagggatctcactgccctaaaggaaagaacacaggcctgtctggctttgccacctgctaattgtagagaccaaaggccttgagtgaacatagggagtcgtcagaaattgcatgcagcaggacttgagcaagacctgtgctgtgctagcttcaggtctgatccagggcagtcatagtggtggtggccagaggtgcttgtgtctttcttctcccagctttaggtggcttagaacagagagaaagactctgtatctttgagagaaaataagggtagggaaagagtctgtggctagtaatccagaaaattctcctggatcttgttgaaggctgtcaaggtggtacttctctgagtctggaagaattacagcattattgggtataaggtgctccataaagcagatatggcttagatcacaacacccaactcttttcaaatatgtgaaaagccttcccaagaaagatagctacaaataatcccagacagtgaagactacaataaatactcaccttttctctctttaaattttattttttaaacttctcatatggtgctgcatgcccaagattttaatgtccagacactgaagaacatctactagcatcaacaccatccaggaaaacatgacctcaccaagtgaactaaataaggcactggggacaaatcctggagaaaaagagatatgtgatgtttcagacagagaattcaaaatagctgtatttaaaaaaaaaaaactgaaagaaatttaagataacaaagtaaggaaattccaaattttatcagctaaactcaacaaagagattgaaatagttacagtaaattaagcagacattctgagctgaaaaatgcaattggcatgctgaagaatgcattagagccatgtaatagcagaatggatcaagcagaagaaatagtgagcttgaagacaggctctttgaaaatacatagaagagacaaaagaaaaagaataaaaacaacaaatcatgccgacaggatctagaaaatagcctcacaaagacagatctaagagttatttgttttaaagaagatgtaaagaaagaggcaggggaggatctagaaaatagcctcacaaagacagatctaagagttattggttttaaagaagatgtagagaaagaggcaggggtagaaaaatttattcaaagggataataacagagaactttccaaacctagagaaagacatccatatccaactacaaaaatgttatagaacattaagcagatttaacccaaaaaacactacttcgaagcattcaatagtcttccaaaagtcaaagataaaagttcttaagcaagaaagagaaaagaaacaaataacctactggggagctccaacatgtctggcagcagactttacagtggaaactctactggccgggagagagaagcaataaatatttaaagtactaaaggaaagaaacttttaccttagaatagaatatacagtgaaaatgttcttcaaaaaaaaagaatactgactttttcagacaaacaaaagctgaagtattttatgaataccatacctgtcctaaaggaatgctaaagggagtacttcaatcaggaagaaaaggacattaatgagtaataaatgatcacctaaaggtaaaaaaaaatcctcactgctaataggatacaaaacaaaacagaatattataacactatagctgtgtggtgtgcaaactactcttatttaaagtaggaatactaagtaatatccaatcaaaagtaatagctacaacaacatttcaagacatagcacaataaaatataaatagaaacaacaaaaagttaaaaagttaagggatgagcacgacccgtcctgagccggcagatgtggtggaagccccggagctccggagctcccggaaggactggagcgtgggcggaaaggaggccgcccctagagccggaagcctgcgcaggggacagaggcctccggcggcgccccccaacaacagcagggcggtgccacattggtcctgagccaggcctggccgccggagacggcgggactctctgggaggccggcggtcctcgggtgtagagggagacagctgcccgggggcacgggcgagcgcctctgggggtcctggatccgagacccgcggcccggggtggcgatgacgcctggagtcatgcgggcttggctgggccggctcttggggcagccaggcgccgctgctggcgtctaggccacaccaccctgaacgcgcccggctcgcctctgatctgttgaagctaagcagggtcgggactggttagtacttggatgggattccgcctggtaatagcggtaccgtaggcttttggcttcccgctccctccttctttcccccttttgtctccgtgcttcccaactgcgccccgcctctgctccccgttgaccgcccccgtgccccagccgaagcccaggacctcctcctgaagatccgccactgcagcaccgccaggcagcagcatcccacctcttccgactcgcggcagccccacccaacccgggcgggacgggaccgaccccgagggtgcaggcgcgggttccctgaggtcccgggtctcttcacgctccccggactcccaggcaattgtattcattcattcagcgtcactgcaaccgtccaagccggtgggaggggcgagcaggggcagcgggtgccacagaccccagccaagacctccgctccagaacccgagggctgctttccccagaggaaggacattttcttcgccagccacgaggaaatccgtccctgtgcaccctgtttcccaatgccaccgacttcgtgtaaactccagtccggaggacaggagagagacccaggcctcgccccgtggacaggctcggcgccacggctcctgccagacacacgagcacactctacaaatctcggggcccaccgcatcaaggagacagaaagaagcaaacaaaggaaggaccttatgaaacgcacccccaaagcaaccaaccaatccaaggaaaaaaacaagtctcagggctccattggttttctgggtggggggggccctgaccccctgttctagcccggcccaagaaccctccaccacaccccggcctgctgaaaggtgccctgtctacctgagcagagcctccctctccaaggctctgtcggtgtcgctccacaactgcctcaccctctccctttctctacttccccctccacctcgcgctctactgtggtgctctctcttcccccctctctctctcctccccccttttctgtctctctctctctctctctatcgctgtctctctctctccctctggttctatttctccatccctctctcccttgctctccttctgcagcaggaggagctgcagacagaacccctcagacaccgagttgtagaaggaagggctttattcagctgggagcatccgcagactcacgtctccaaaaaccaagctctccgagtgagcaattcctgtccctcttaagggcttacaactctaagggggtccgcgtgagagggtcttgatggattgaggaagcagagggtacgtgactgggggctgcatgcacaggtaattagatcagaacaaaacaggacagggattttcacagtgcttttctatacaatgtctgtaatctatagataacataaccgagtaggtcagggatcgatctttaactaccaggcccagggtgtggcgcggggctgtctgcctgtggatttcatttctgccttttagattttacttcttctttctttggaggcagaaattgggcataagacaatatgaggggaggtctccctttgagctatctgtgtctgtgtctttgtgtgtccgtgtgtgtgtgcccgggtgtggtgtgtgtgtgtgtctgcgcgcatgcacccgtgtgtatccgtgggtgtgtcagggtgggtttgctcgtggtagtggtggggtgtgtctgggtgtccgtcagcccctctttcccgggatgaggctgccggggctctagtgccagggcggggcaaagcagagccttcttgcccctttggccatggcgggtcctcctcagaacaagcgacgatggtgtgagcattgtgagaaaaagggcctgtggggctgggccggctgttcgcccctgggcagccctggcggctctgggtgtgtggggcaagagggggccttgcaggaggggcggtgaggaatccaaaataatttttccgcggcaaggcggaggaccggaggggaccccaggaccgtgggccctgggccctgacgcctcggagcacaccccgtcctaagcgggccccaggtgttggaagctcgggagctcaagagcctggggaaggcctggagtcccagcgagagggtggccgcctggagagtccagagccctggcaggggatggaggtctctggcgcctgggctgtctcgcgcatggtctggccgccggcgacatcgggacgctctgggaggtcggcggaaagcgcagcgcggcgatggtggtgcttgggcgtagagggggagagcagcccggccacaggcaagcggctccggggtgcctgatcccagcctcgcggcccccgggttggtggtgacgcctggaatcaggcaggcgtagctggactgggctcttgggccagccaggcgccactgccattgtccacggccataccacctggaaaatgagagagacccaagccgcggcccgtgggcacgctcagcgccactgctcctgccacagtgaggggcgcactctacaactttcagggcccacagcaccaagaggacagggaggagccaacaaaggaatgacgctacgaaaagcacccccaaagcaaccaacaaatccaagtaaaaacacgtctcagggctccgttggttttcccgcgtgggcggccctgcccccatgttccagcccagcccaggcaccctccaccctaccctggccaaaggggcccctgtctaccagatagagcctccctctccaaggctctgttgctctccctctctagctccctcaccctttccctttctctacttccctctccaccttgctctctctctctctctctctctcaatctccccagttcctctctgtctctctctccatcgctgtttctctccttccgtttctatttctcatccctctgtcccttgctctccttcaagttgtctgtgtctttgtgtgtctgtgtgtgtgcttgtgttcccgcgcgtgcgcccgtgtgtgtctgtgtgtttgggagtgggtttgctagtgattgtggtggggtgtgtctggatgtccatcagtacctttgtcccaggatcaggctgccaactctattgccaacgcctgggtgtcacagttgccgtgatagtctcacacacgcagttgtgttcatctcgttcgttttcacgtagacaacgagagcgaaaccacagagaaaagaaacatcccgtgcatcacggcctgatgatggattcctgtttcctgcaaaatggggagtctccaatatagcctgtttgaaaactggaaaggagagcaccgacacgatgctggtcttccacgcattcctggaagtttctggggccccacagagctcgcgaaacagtcaacatggtcacgctttcggggggcagaaacttgagcaacaggcacctttacagagggcaaagaaacgtggaatccagaatcacgcttcagttggcctgagtgtgactcctgtgtggatgggactatccgcctcgagctctgttgcagggctcaacgtggggatatgtcatctgtgaaccatgtggatgaaaaacagacaactacctggg

SEQ ID NO: 703 - DNA, 334 bp, Homo sapiens
agatgttctcaggcgtacgcttctaaagaaacattgtagactcttctactggcctttatctagtcactgctttaagcaaggaataaaacatctgtggctaaaatttgtaaaactgtgtttcccacccacccttcagacctgacagaagagtttttaggattttaagggaacagctttttcgtgacccaaaagggaacagtggtgcaaagaccaatgtcacgtaggtacattttccccatctgtaaaataactttccgatacgattcccacacctggaatcagtacaatgttttgactgaggtattagaaaaacttatgagttcattatcatttg

SEQ ID NO: 704 - DNA, 397 bp, Homo sapiens
agacgttctcaggcacacacttctaaagtaacataggaggctcttctagtggcctttatctagtcactgctttaagcaaggaataaaacatctgtggctaaaattcataaaactgtgtttcccacccacccttcagacctgacagaagagattttaggactttaagggaacagctttttcctgacccaaaagggcacagtagtgcaaaggccaacgtcacgtaagtacattttccccatctgtaaaataactttcaggtagtattcccacagctggaatcagtagaatgttttgactgaggtattggaaaagcctatgagctcattatcatttgaacatatgagtaatggaaaatttaggcagaattttatttgaaaggattatttatgcaattttt

SEQ ID NO: 705 - DNA, 6495 bp, Homo sapiens
tttttagttaagaatcaccttaaaacttggaacctggatacaagataattccttcattctggaaacgtttagtagcaaactatatgccaggactgtgataattactagggatacatgattgaatatatagcataagatgccttggagtgtcagatagtttcatataaatggctcatgcagtatatagacagtgtggtaaaaagagactactgagatgtgcagaggacagacaataaagggtctttgaatggtagatgaatgtgtttggacttttcattcagggctgttgaagtttttgaaggtcagttgtcttagagttttggtgttttcaagccctgctaagtactttgtttctagctgatgattggccatcattactgatcatctattggctctgtctgattcagcaatcccacggctgagtatttatgcaaaggaaaaaaatcaatgtatcagaaatataactgtacttttatatttgttgcaacactattcacagtagcacagatataaaatcaacctaaatgtccatcaacaaatgattggaaaaagaaaatatagaaaatatacacaatgaaatactattcaggagtaaaaaacaatagaatcataatttttgcagacacatggatggaactggaggccattgttgtaagtgaagcaagccagacacagagtaaacatcgtattttatcactcataagcgggtgctaaaagatgtgagggtattgatgtagagagtggaatgataatggagactcagcagggtgaggggatggaaggggtgaacagtgagaaattacttaatgggtacaatgtgcattattccagtgatggatacctaaaagccctgacttcaccactatgccatccatgcttacagcaaaattgcacttggaacccataaatttatacacaaaaagtcttagacctctctctcttctctcataagcctcagagctcagtgatccccttggatctcctcagcctgctgagttttaactttcctacctaaggtgattttgggcagagacaagggagtgtttcaggaagatgttctcaggcacacacttctaaagaaacattggagactcttctagtggcttttatctagtcactgctttaagcaaggaataaaatatctgtggctaaaattttaaaaactatgtttcccattcaccctttagacctgacagaagagattttaggattttaagggaacagctttttcctgacccaaaagggcacagtagtgcaagggcaatgtcacataggtaccttttccccatctgtaaaataactttccgatactattcccacagctggaatcagtacaatgttttgactgaggtattggaaaagcctatgagctcattatcatttgaacatatgagtaatgtaaaatttggcagaattttatttgaaaggattatttatgccatttttaattaactgatttatattatggttatttcaaacaataaaaatcaggttattgtgtcgtaagctagaaatatttacaataacacatggtcttgattatctcacatgatgaattgaagattaaagcaaaataatttagggaattctgtgacagtttctgtttcacgttgtttaataatgacttcaaactcttgtacatatatggagaactcctgactaaagagaatttttttgtccattgtgctatgtttctgtaactttttaagatctagaggaacacatatttagtctcagttggccaactaaatgttatggagtcagcttctgtgttacatgctgagcattgaagggatggtggagacaaggctgctgccctcgcagagtctgtggagaatacctgatggagtgtggcagggaacatgctggaagcatcccaggatgccaaaagtgcacacagatggaacacctgccttagaagtggggagggtcagacaaggagagttgtcaggaaaagcgaggaaaatttaatcagcaggaatagaaacacacttgagaaatccatgtggaatgaaaagagaatggctgagcagcaacagattgtcaaaaaggaaatcaagaaggagcagccaaagaggtggatggagaaccacgagaaagaaggtgacacaggaaggggaatatcacactctggggactgttgtgggatgaggggaggggggagggatagcatcaggagatatacctaatgctagatgacgagttagtggatgcagcacaccagcatggcacatgtatacatatgtaactaacctgcacaatgtgcacatgtaccctaaaacttaaaagtataataaaaagaaatcattaaaaaaaaaaaaaaagaaagaaggtgacactgaagccaagggaaagaaagtgtttcaacatttctgggaaaaaaaatgacattctctgtcttaaccttgttattttatgagtcatatagccacattccaggttctgagaagtccagcactaaacatgtttctttttgtttgcttaacccagcatttgccagaataatctgggctcagtgtgagtgtgtgtgcgtgtgtgtgtgtgtgtgtgtgtgcacctgtgtgttccactaatatctctctggggctagtgctctatacaacataatttttaaaacactggttttatccatcttattatgttcagctgcagcaatacttacaaaagtcaactttgattatgtgtcttagttactaaagaaaacaaaacaaactaatgaataaagcccacctggcagtggctcctcactacctgtacgatggagccaacctggtttggcctccatgccctatgccgacctggccatgctgtcttctgcctgctgctttgcctcccctttcctcctggagaaggtagagatgctctgacatttggctcgtctggaacatgtgtccttctcctcatgtggaccatgttttcctgagtccactttaatctcgtttaagggtatagaactttacttaaagcttctggtcaggtctcactctctatgctgtcttcctgccacttctacaatgtacatactttactgatacattaattatgctatatcagccaagggttttacttctatatcattttatatcatcatctttttttcttagagcttagttcacttatttattaagtctttccacactataattgtatgtcatataattttatatttattttcattggtgtttatatatcttttctgtaaaaatggaggctttctaaatagatcttcattaacgttgagagaacaaggttttaagtcttggtctcagccaaaaggagttccccgcattaccaggagggaaagaaacacttgcattgttgcattagatattcttacagagaaagagaaccatgtgtaatggaaaattgctaactttgcctcaaggggactaggttgattcagtgagaaagtttctattggtttagaaagcatagttctgagtattctaggagaaggagaaaagttagagtagggcataagaagtaatgcccatatcaaaaagttagaaagatctcaaattaacaacctaacatcacaactgaaagaattagagaagcaagaagaactcaaccacaaagcttatagaagacaagaaataactgcaatcagagctgaactgaaagaaattgagacaagaaaaactgttcaaaagatcacttaatcaagattttatgaaaaaaataataagatagatagggcactagctagactaataaagaagaaaagagaaaagattcaaataaacaaaattagaaatgatgaagggaatgttaccactgaccccagagaaataaaaataacaaccagcaactactatgaacacctctacacacacaaagtagaaaccccagaagagatgaataaattcttggacacgtacactctctcaagactgaaccaggaagaaatttagtctctgaacagaccaattatgagctccaaaaattgaatccataataaatagcctaccaaccccccccaaaagcccaggacctgatagattaacaaattttaacagaggtacaaagaagagccagtacttgtcctactaaaactatttcaagaaatacaggaggagggactcttccccaacttgttctacaagaccagaatcatcctgataccaaagcctggaagtgacacaacaaaaaaagaaaacttcaggccagtatccttgatgcacatccattcaataagctacaacaaaatacttgcaaactgaatttagcaacacatcaaaaggctaattcaccatagtgaactaagcttcttccctggaatgaaagtttggtccatcatgggcaaatcaataaaatgtgatacgtaacataaataaaactaaagataagaaccacgtgattgtctcaacagatgcagaaaaggctttcagtaaaattcaacaaagcttcatgttaaaaattctcaataaatgaagtatcgaaagaacatacctcaaaataataaaggccacctatgacaaactcacagccaacattatactaaatgggcaaaatctggatgcattctccttgaaacccacacaagacaaggatgccctctctcactactcctattcaacatagtattagaagtcctttctggaacaatcagacaagagaaagaaatgaagcatatttaaatagaaagggaagtccaactatctctgtttgcagacaacataattctctatctaaatcctatagttgtgacccaaaagctctttaagctgataaacaacttccacaaagtttcaggacacaaaatcaatgtacaaaatttgctagcattcctatacaccaagaagagtcaaactaagagccaaatcagagaggcaattttattcacaatttccacaaaaagaataaaacatgtacgaatacagctaaccagggagttgaaaaatctctacaacgaaaattacaaaacactgctcaaagaagtcagagaagacataaacaaatgaaaaatcattccatgttaatggagagaaagaattaatataatttaaatggtgtactgcctaaagctattcctattaaactaccgatgacatgattcatggaagtagaaaaaagctatttagaaattcacatagaaccaagaaagaatctaagtagctaaggcaatccgaagcaaaaagaacaaagcttgaggcatcacattacccgacttcaaactatactatagcactatagtaaccaaagcagcatggtactagtacaaaaacagacatatacaccaatggaacagaatagagaagttagaaataagaccacatacctacaagtatctaatctttgacaaagctggcaaaaacaagcaatggggaaaagattccctattcaataaatgatgctggaataactggctagccatatgcagaagattgaagttggacttcttccttataccatatgcagaaatcaacccaagatgggttaaatacttaaatgtaaaacccaaaactataaaagccctggaaggcaacctaggcaataccatcctggacgtagaaacaggcaaagatttcatgataaagacaccaaaaacaacaaatgcagctattgacaagtgggatctaattaaacttaaaagcttccactcagcaaaagaaattatcaatagagtgaacagacaacatatagaatgagaaaaaaatatttacaaactatgtatctgacaaagatctaatattcaatataaggaacttaaatttacaagagaaaaacaaaaaaccctattaaaaagtggccaaagccctgacttctgaatggcacttctggacccagccagggactgagggatctcactgccctaaaggaaagaacacaggcctgtctggctttgccacctgctaattgtagagaccaaggccttgagtgaacataggcagtcgtcagaaagtgcatgcagcagaacttgagcaagaccctgtgctgtgctagcttcaggtctgatccagggcagtcatagtggtggtggccaggggtgcttgtgtctttcttctcccagctttaggtggcttagaatagagagaaagactctgtatctttgagagaaaataagggtagggaaaaagtctctggctagtaatccagaaaattctcctggatcttgttgaaggctgtcaaggtggtacttctctgagtctggaagaattactgcattattgggtataaggtgccccataaagaagacatggcttagatcacaacacccaactcttttcaaatatgtgaaaagccttcccaagaaagacagctacaaataagcacagacagtgaagactacaataaatactcacctatactctttttaaattttattttttaaacctctcatatggtgctacatgcccaagattttaatgtccagacactgaagaacatctactagcatcacaccatccaggaaaacatgccctcaccaagtgaactaaataaggaccagggacaaatcctggagaaaaagagatatgtgacctttcagacaga

SEQ ID NO: 706 - DNA, 396 bp, Homo sapiens
agatgttctcaggcacatgcttctgaagaagcattggaggctcttctagtggcctttatctagtcactgctttaagcaaggaataaaacatctgtggcttagatttaaaaaactctgtttcccacccacccttcagacctgacagaagagattttaggattttaagggaagagatttttcctgacccaaaagggcacagtagtgcaaaggccaatgtcacataagtacgttttccccatctgtaaaataactttcagatactattcccacagctggaatcagtacaatgttttgactgaggtattggaaaagcctatgagctcattatcatttgaacatatgagtaatgtaaaatttagacagaattttatttgaaaggattatttatgcaatttt

SEQ ID NO: 707 - DNA, 660 bp, Homo sapiens
acaaattgaggagtcctttattagccagcgaccgagaggcagctaacactcaaaattctcttggccccgaggaaggggctggttttgtttttattccgcactctaaataggggaggagggagtttaactgaaacaatttttacggaagcagagctggcaaatagttaaaaaattaattggttataaaagcagttacaaaacaaataaaccattccaggtgcaggggcttaaactatcacaaagagagaaatgcgggggttttgtgtgatattcactgagtgcgtccccaggagctgctggtgcagcttgcctcaatatcttatcagtaagtgcattcctggacgtgcttttagtcaatttacactagttatggccttaagggagggaggtaaagggggctgcacttgaagaaactaaaatagagtctgtccggctctctctccgctaggagagagtcactcaggttaaaacaaggtagggtatcacaggaccatgtacaattcttcaaactccagcttcaaatctctttcttattgctctcttaagacagtatatttagatcagagtaaatgaaagtaatgttattaggagataagattaaaatcgatcccatttgtaaaaagggtaatagattatttgtgaactgtaatactttttttt

SEQ ID NO: 708 - DNA, 247 bp, Homo sapiens
acaagcactgagcctagcgtggggtccaggtgtctctggcatcatgccctcctaggtcgtggttgtccctccttgttgctcctgctgtcttcttcagttacatcagcttctctgcatttcctcattttacagtgtgtgggatgcagtcatctctgaacaggaataggcaactgtgcacctgttacaccgtgcttgatgctctgcattgatgtacactgggcccaggtttccctggtggactgcttgg

SEQ ID NO: 709 - DNA, 1181 bp, Homo sapiens
gatggctgcagtggatgggctcatcaccagaataaaattttctctttaatacttttttagaacattaagtgagaaccagagagtctaaaactgggttacacagcagcaataaaatcagagtgacacttactttgcagcagcaggactggaattcttgctgttggggttggtggcagcaaactcaattatgggtgtctcctgcttcatgcttagatgatgtgttggaatatttcctgtttagaactctctaacacttcctgactagagctgtttaaaatagaaacaaactcctctgattttgaatttagcctatttattgttacgatttgttcatatgtttctactttttagactgtggctttcttgtagacagaaattatatcttatacctctttttcttcagcagcagtgtgcctggcacctatttgaattgtcaggttcattgaatgagtaaagcaaaattatactagacttaaactattaactttatcaattctactcagaaaatatatagctaagtatgacgtatgaatcaatttactcacttattcaacaaacttttttaagtgactacaatatgttatgagctaggaatatgacagtaaacaaatctcaccttgtctcaaacttcagtggatccaggagtctctagaagtttaattcttgctcaatcagcaattccttttcactgaagacttgacaagaagttttgagaaggcaagagtgtgtgaactcagcagatgtttgtgatgcacctacctactgtgtgccagaagctgtagtgtcacaggctctgcctgtgtctcctaggaaaggtgaaaactaaggacaatattttacacaacaaataatggcaagtatgccatgtgatggagagggaaagtgctggctcccaagagtataacaggcactgagcctagcatggggtccaggcgtctctggcatggtgccctcctaggtcctggttgtccctccttgttgcttctgctgtcttcttcagttacatctgcttctatgcatttcctcattttacggtatgtgggatgcagtcatctctgaacaggagtaggcaactgtgcacctgttacaccatgcttgatgctctgcattgacgtacactgggcccaggttttcctggtggactgcttgggccattcttgtcacctggctctgaagtcttt

SEQ ID NO: 710 - DNA, 249 bp, Homo sapiens
acaagcactgagcctagcgtagggtccaggcgtctctggcatcttgccttcctaggtcgtggttgtccctccttgttgctcctgctgtcttcttcagttacatctgcttctctgcatttcctcattttacagtgtgtgagatgcagtcatctctgaacaggaataggcaactgtgcacctgttacaccgtgcttgatgctctgcattgatgtacactgggcccaggttttcctggtggactgcttgggc

SEQ ID NO: 711 - DNA, 659 bp, Homo sapiens
acaaattaaggagtcttttattagctggcgaccgagggcagctaacgctcaaaattctcttggccctgaggaaggggctggttttgtttttattctgtggtctaaataggggaggggaaagtttaactgaaacaatttttacagaagcagagctggcaaatagttaaaaaattaattggttacaaaagcagttacaaaacaaataaacagttccaggtgcaggggcttaaactatcacaaaaagaaaaatgcaggggttttgcctgacattcaccgagcgcgtccccaggagctgctggtgcagcttgcctcaatatcttatcagtaagtgcattcctggacgtgctttgagtcagtttacactagttatgcccttaagggagggaggtaatgggggctgcacttgaagaagctaaaatggagtctctccggctctctctctgctaggagagagtcactcaggttaaaacaaggtaggggatcacaggaccatgtacaattcttcaaactccagcttcaactctctttctaattgctctcttaggacagtatatttagatcggagtaaatgaaagtaatgttattaggggataagattaaaatcgatcccatttgtaaaaagggaagtagattatttgtgaactgtaatacattttttt

SEQ ID NO: 712 - DNA, 486 bp, Homo sapiens
aaaaattaattggttacaaaagcagttgcaaaaaaataaacagttccaggtgcaggggcttaaactatcacaaagagagaaatgcaggggttttgggtgccattcaccgagcgcatccccaggagctgctggcgcagcttgcctcaatatcttaacagtaagtgattcctggacatgctttgagtcagtttacactagttatgtccttaagggagggaggtaaagggggctgcacatgaagaaactaaaatggagtctgtccagctctctgctaggagacagtcactcaggttaaaacaaggtaggttatcacaggaccatgtacaattcttcaagctccagcttcaactctctttcttattgctctcttaggacagtatatttagatgggagtaaatgaaagtaatgttattaggggataagattaagatcgatcccatttgtaaaaaaggaagtagattatttgtgaactgtaatactttgttt

SEQ ID NO: 713 - DNA, 508 bp, Homo sapiens
gccagcatgcctggctaaatgaaagcttcttttcttttctttcccttggtctcaaactcctggactcaagtgatcctcctgcctcagccttctgaaatgttggaattacaggctgagccactacacccagctcaattttcttccagtgttgctgtcctcagtaatttcagcttaatctgcatctctcaccatgtccaatgacagaccatgtacacagtaatatattcagagtgacacattgaatacagtaaatgtgtgtggtaattttttaacatgctctatgctgtccatatgtgaaatagtaagcattcaataaatggtagctttcctacataaatacccagcaacagtactgtataagcttttacagataatctgtaaaatatgtatctttacattatttatgttatcagaagtgataatagacaccctgttttgattcttgttgtctacttaattcataattccacattaatacataatatggcttttttgtacttttgaaaat

SEQ ID NO: 714 - DNA, 508 bp, Homo sapiens; identical to SEQ ID NO: 713

SEQ ID NO: 715 - DNA, 1954 bp, Homo sapiens
tttttttcttttcttttttttttttttttttttgagacggagtctcgctctgtcgcccaggctggagtgcagtggcgcaatctcggttcactgcaacctccgcctcccgggttcaagccattctcctgtctcagcctcccaagtagctgggactacaggcgctcgccaccatgcccagataatttttttgtatttttagtggagacggggtttcaccgtgttagccaggatggtctcgatcgcctgacctcgtgatccgcctgccttggcctcccataatggtgggattacaggcgtgagccaccgcgcccggcctttttttttttaatttaatgtcacactccaggcacaggagtacctagggggaagtgcagatcttcacaagtgcctagggccatgccttccatttggcaagggaggtgtgtatgcctgaccgctcccctcctttccactgttcccaggcccctgctgggagcgagcctgcacagaaggtggtggagccggcagctgaaaaccagtcctggggaggctgggaggcatggggagcaggacctcgcttgagccaggctccaaaagtctctagcccatgttctgctttctcatcggacttcattataagacacaaattgaaagataaaattattaagaatttcaagacaggaaccacagagctttagaacccaaacacagtatcccttctaagcatggggcccttgtgtgactgccctggtcactcacccatgaagtttactctgctttctacactggtagaatagtttgttcagagagcatgttttttggtaatttcaataaatattgataaattgccctgcacaaagttgtatacttcactgtaccctggctttctccttagtgagtgagggaataatatcatccacttcatcagggttatcatgagaatgacatgaatgagtccctgtgaactgtgaatggtacacagtaaccactcagtaaatacagtcattagcccttacatgcagtgattttcttctggaactccctctagtggcataaatataaagaggaattcacgttttcttttctacttttgtggccctatttcccataatatttgtgtgtttaaattggtctagatattccactgaggctcaatgaccgatagactataaaatgtctaatttacatcaatttagccagatgcttcctaggtaggtcggagaaatgagaacactgatccgaatcaatgtgaggcagctcccagcaagtgagcgcctgtagcatgtgtgagcatgggtgctgtggtgaatgcagccaggggctgctctttcatactgctttatttctttttcttttctttcttttttttttttgagacggagtttcgctcttgttgcccaggctggagtgcaatggcacgatcttggctcactgcaacctccacctcccgggttcaagggattctcctgcctcaccctcctttgtagctgggactacaggcacccgccaccacgcccggctaattttttgtattttagtagagacgaggtttcaccatattggtcaggatgggctcgatttcctgacctcgtgatccacccgcctcgtcctcccaaagtgctgggattgcaggcatgagccaccgcgcccggccatactggtttatttctttttctttttttttttttttttgagacagagtcttgctctgtcgcccagtctggagtgcagtgacacgatctcggctcactgcaagctccgcctcccgggttcacgccattctcctgcctcagcctcctgagtagctgggattacaggggtgcgtcaccatgcctggctaattttttgtatttttttagtagagacggggtttcaccgtattagccaggatggtctcgatctcctgacctcgtgatccgcccgcctcggcctcccaaagtgctgggattacaggcgtgagccaccgcgcctggcc

SEQ ID NO: 716 - DNA, 1959 bp, Homo sapiens
tgtggggtttttttcttttcttttttttttttttttttgagacggagtctcgctctgtcgcccaggctggagtgcagtggcgcaatctcggttcactgcaacctccgcctcccgggttcaagccattctcctgtctcagcctcccaagtagctgggactacaggcgctcgccaccatgcccagataatttttttgtatttttagtggagacggggtttcaccgtgttagccaggatggtctcgatcgcctgacctcgtgatccgcctgccttggcctcccataatggtgggattacaggcgtgagccaccgcgcccggcctttttttttttaatttaatgtcacactccaggcacaggagtacctagggggaagtgcagatcttcacaagtgcctagggccatgccttccatttggcaagggaggtgtgtatgcctgaccgctcccctcctttccactgttcccaggcccctgctgggagcgagcctgcacagaaggtggtggagccggcagctgaaaaccagtcctggggaggctgggaggcatggggagcaggacctcgcttgagccaggctccaaaagtctctagcccatgttctgctttctcatcggacttcattataagacacaaattgaaagataaaattattaagaatttcaagacaggaaccacagagctttagaacccaaacacagtatcccttctaagcatggggcccttgtgtgactgccctggtcactcacccatgaagtttactctgctttctacactggtagaatagtttgttcagagagcatgttttttggtaatttcaataaatattgataaattgccctgcacaaagttgtatacttcactgtaccctggctttctccttagtgagtgagggaataatatcatccacttcatcagggttatcatgagaatgacatgaatgagtccctgtgaactgtgaatggtacacagtaaccactcagtaaatacagtcattagcccttacatgcagtgattttcttctggaactccctctagtggcataaatataaagaggaattcacgttttcttttctacttttgtggccctatttcccataatatttgtgtgtttaaattggtctagatattccactgaggctcaatgaccgatagactataaaatgtctaatttacatcaatttagccagatgcttcctaggtaggtcggagaaatgagaacactgatccgaatcaatgtgaggcagctcccagcaagtgagcgcctgtagcatgtgtgagcatgggtgctgtggtgaatgcagccaggggctgctctttcatactgctttatttctttttcttttctttcttttttttttttgagacggagtttcgctcttgttgcccaggctggagtgcaatggcacgatcttggctcactgcaacctccacctcccgggttcaagggattctcctgcctcaccctcctttgtagctgggactacaggcacccgccaccacgcccggctaattttttgtattttagtagagacgaggtttcaccatattggtcaggatgggctcgatttcctgacctcgtgatccacccgcctcgtcctcccaaagtgctgggattgcaggcatgagccaccgcgcccggccatactggtttatttctttttctttttttttttttttttgagacagagtcttgctctgtcgcccagtctggagtgcagtgacacgatctcggctcactgcaagctccgcctcctgggttcacgccattctcctgcctcagcctcctgagtagctgggattacaggggtgcgtcaccatgcctggctaattttttgtatttttttagtagagacggggtttcaccgtattagccaggatggtctcgatctcctgacctcgtgatccgcccgcctcggcctcccaaagtgctgggattacaggcgtgagccaccgcgcctggcc

SEQ ID NO: 717 - DNA, 459 bp, Homo sapiens
cttccaggtgccaaattctgtcacagtgatcttttgctgtgcaataagccatcttgaaaacactggcataaaataatgattatttattaccaatttttaaaaaagagagaatcctggcttctgtgggtcaggactttgggcaaggcacaacaagaaaggcttttctacttcatgatgtctagggtctcagccagaagccccagagctgagggtgactctagtatatgaggcggtggctggaggatccccttctaaggtgttctttttagtcctgtgtctgacacattggcagggatggctggaaggctgggctcagctgggacggttgctcagagcacctctctgcggccacttcagcatggcagcctccatgggtagtgagacttctgaaatgacaggtcagtgccttgtgagtaaggtaggagctgcatggctttttgtgacccagcctgaaaagtc

SEQ ID NO: 718 - DNA, 6155 bp, Homo sapiens
cttccaggtgccaaattctgtcacagtgatcttttgctatgcaataagccatcttgaaaacactggcataaaataatgattatttattaccaatttttaaaaaagagagaatcctggcttctgtgggtcaggactttgggcaaggcacaacaagaaaggcttttctacttcatgatgtctagggtctcagccagaagccccagagctgagggtgactctagtatatgaggcggtggctggaggatccccttctaaggtgttctttttagtcctgtgtctgacacattggcagggatggctggaaggctgggctcagctgggacggttgctcagagcacctctctgcggccacttcagcatggcagcctccatgggtagtgagacttctgaaatgacaggtcagtgccttgtgagtaaggtaggagctgcatggctttttgtgacccagcctgaaaagtcacatagtgtcatgtctgctgtgtctaagcagtcagaagcctgcccactctcaaagggaggggacccaggctccacttctcagtgggaggaatgtcaaagaacctgtggtcatgttaaagttgctgctgctgcttctacaatttccatcctctttggtcctttttgatggctcctaataacccacatctcatcataaaccacaagactttgccagaagccaaggaaagagcagccctccaaattgcacctttgttcccagttcccaccagagtccctggagattttatccattcgtgatatcttctttctcttggttcttccagtcttaggggtggagcttccagtaatgtatttgtgtttccagagagctcaaaacacagctgaaaatatgcctgttggcatagggaatgttcatgctacatttggtaagtgaagaaagcaaaggaaaaatcaagtggaagaatatagatcaaggtgctaagtggttatctctgaatggaagatttagaggtaatttctattttgcttttgcatatatgtatttttcttttttatatgaagcccaactatcacatggaaattaagcgtgtaggctctgaagtcagactccttgggtttaaatctccattccttcaatttccagctttctaaccttgggcaagttacttagattttgtaaaactcagtttcctcatctctaaaatggggataatgatagatcaatagtttttacctcaaagggctgttttaaggattaaataaaattatgtatgtaaatactttgcataatttttggcataaaataagcagtcagggttagggattatttttagtggtttcattaataagttttaaaagagataaatgagttttgtttctaatatcttgataatggcacttcgtgtgaatgaatctgtgtgttttaccagaaacaccaactcggttttattgctggaaatatctcataatttgctttcacaccttttaagagctattttctcgagacatactcggcttttatgaagattttgaaaatctagggcagtgattttccttagaggggagcaagaaggtcaccaggaaagtctgctgtcctcccgtggatcctcatttttctagagtaagtatttaatcaggcaagattgagaagctaaaagcaatagaataattgacctaattttttttaagtgcagaagttttgttctttgcctgaacacaaacatatttcttatcctaaaaggatttttaaaaatttgttttgctgtcagcaaaaatttaggcttttgcacataacacttttgctagctaagtaaataggaaggacagacaagactatccactgtatatttagtctgaatgagcaaaaagtggtggagaggtcggggttacggtctccttatcccagtaaaactaggagactgagaccctccagcagtgttatgctgtgggaacagggctggcctggatctaaggagttagggttaagccagagctggaagtttgtcagttatacacctggtgtaagagctagcatggaaggaacatacaataagtgatgaagggatggatggatgatgaacagatagatggacggatggttaatggattgatggatgaatagacagacgatgaacggatggatggatgatggatggatggatggacggatggatggatgaatgaacagacgttcgaatgggtagatctctttccactgtcctaggctgcctgaaggtcttgagtcttggatcttcttgtgagctatcaattgcctgctcgataatgaaataccagttgagacaaattggccatgagagacatttttgggtaaattgagatcatttgaatttggtctgggtattagatgaggtgaaatcttactggaatgagaagatgaaatttattgaccaaaaaaagcaagcacagaatgttgtgtaatcttgtttgggttgaaaaactacgtatacgtataaatccaaatgctggctctcacaaaacactatcaaaatgagctcccgagaagacaaagtggagtgttctgctagactgcatcacctttttccccccgtggatctctgctcatgctgttcccactgcttggaacgtcatttccttcccaccctccaccttccccagttcctactcatcctcccgtgtgcagcttcactgtctctccctcagggagtctcccccgctctctaggttagaaaaccatatgcacgctcttggctctcattagatcgtaattttttaaatgtttgaaaatgtttgtagctagcacaacacaacacattccctgaatgtgtgcagtaggcattcaaaaatgtatttctaggtgaattatgtaaaaagaaatgttatggaatgtgttgttttttcctcctcccttccacaggatcctggcgtgttccaaaaagagaatatttgctaatttgacaaaatgctggaagatatagaaattttttttttttttttttttttttagacagtgtctcactctgtcgcccaggctggagtgcagtgatgcgatcttggctcactgtaccctctgcctcccgagttcaagagattctcgtgcctcagcctcctagtagctgggactacaggtgcccaccatcacgcctggctaatttttgtattttttggtagagatggggtttcagcatgttggccaggctggtgtcagattcctggccccaagtgatctacccacctcagccttccaaagttctgggattatagtcatgagccactgtgcttggcctggaagagatagaaattcttttagcaatgtaataccaagagctgggttaagaggagccccatttagcagtaatgcggttggaaggtggtgttggtgaactccctgtgagaggggaagccagctggacttcctgggtcgattggagacttggagaacttttctgtcttacaagagtttgtaaaatgcaccaatcagtgctctgtaaaaacacaccaatctgcgctctgtagctagctagaggtttgtaaaatggaccaatcagcaccctgtaaaatggaccaatcaacaccctgtaaaatggaccaatcagcactctgtaaaatggaccaatcagtgggacatgggtggggacaaataagggaataagagctggcctcccccagccaggaacggcaacccgcttgggtcgtcttgctttgttctttccctcttaacaataaatcctgctgctgttcactctgggtccgtgccacctttaagagctataatactcaccgcgaaggtccgcgatttcattcttgacgtcagtgagaccacgaacccaccagaaggaaccaactcggacacacctacagatgggaagcccctccctttggtccacacagacccagaaggactgagaaatggagaacccttggggtagggaaggaggtcaagggtccttgaagaggagaagagagagggggtctgaaagggagaagtcatggtggcttgtgacacagaactgagagctttcaggggaaggaccttgacagtttcagaagagttgaatgacggaactttctagacccccacaccctccaaacccctgggcactagattggagactatgactaaaatccaaaagaaaggactctttttgtttattttttttacattccaggtagggcttgcctagctaaaaatgagagcatttattactgacccaccatctctttcttgggaatagggtggtaggttatagaaaacaagatttatttttcttccagataacttccatattttctcaatgttcttatatgtgtatgtgtagatccaaatgccggctctccaaaaatactacgacaatgaaaacggagtggagtgtttcgctctgtcgccccatcttccctcctccggtctgtgcacccactgcatgagcacgtggtgttgtcttagataatttgagctgctgtaacagagtaccacagactgggtagcttataaacaacagaaacgtatttctcacggttttagagaggctggaagtctgagatcagggaacccgccaccgtggttgggttccggtgaaggccagctttcaggcaacagactgccaacttcgtgtttcaacctcacctgagggaagagggcaagagggctctctggggtcccttttatgagggcactaatccctttcatgagtgttccatccctctgacctcattacctccccaaaacccttcatcctactaccacccaactgggggttagggttagaacatataaatgaagatggggagaaatacaagcattcagtccataaccaatggtttgaatatttgtacaaaatttatgtctacagaagatactcgaatacacacgcttatctcaaacaatccctgtttccatcttgtcatgcatatttccagacccatagagtagtaaatggttgagagctgatggcatcctttccatcttaacctcagggagccctcccagcaactttgagatagagacgctttatagtatctttttacagatgagaaaacagaagctcagagaggtcaagcaacttgtccaaggtcacacagcagtgaggagaatgtgagtgagatttgagcaccggcattctaagtccacactcttaaatactctactggactgctccctctttataaacctagcaaaattaaaatgcaagtatatttttgtgatttaaaggtgaatttattatttgtttttttcatttttttgtatgtgaatttttctctctctttttttttttttttgagacgcagtctcactctgtcacacaggctggagtgcagtggtgtgatctcggctcaccgcaacctctgcctcaccagttcaagtgattctcctgcctcagcctcttgagtagctgggactacaggaacctgccaccccacccagctaatttttgtatttttagtagagagacacggtttcaccatgttgccccggatggtcttgaactcctgacctcaggtgatctgcccgcctcggcctcccaaagtgctggtattacaggcgtgagccactgcacctggccaaatttattttttttaataaggaaaggagaggatggtggcctgctgacaggtgcagaggtgcctgatgatttgtgtttcctaactggcttataccatgtgactaagaaggtggcagaagtgatgccacctgtccaggggagttttctggtacatcctgggaactggtcgtttatgatcatggcagaaaacacagctctggtagattcaaaagacccctatgtccagtgtatgctcaaagtatggaactaagcatacctgtggtcctgggaagtccagatggccatctcttccagggatcctgctctctctggcataccaggcagtcttttatcagctttgtgtccatgtcagagtacacctcaccaggcactcctttgctcctggttgccatctcagccctggtgcatcttgtggcccttgcaacgatgaagcatgacgatgttgcagggtgcccttgggcaggaccctctctggtggccaggaatgcgagtggtgaagacgggagctttgtggtaaggtgtgcatgtgctgtggctctgctgcaggagaggaagagaagccgttcagccccacgcccagccccttgcagaccgcgtccaagcaagttctgaggtctggctccggcagctcgtaatgcaaaggggccacactcgcat

SEQ ID NO: 719 - DNA, 531 bp, Homo sapiens
cagacctaggagaacaatattttcccttctgtcgttttgataattacatcctctgtgctcagtggtggcctattaactcacatgaataccatgggcttgcaaaatggcctcaaatttccatatattggaactgtgagaactttctataatggtgctttagcaataatgatggaggtgcaggcatttcctgaggattaatgaccagctgggaggaaccagtggcccttggctctgcctcccagccagccattaattctaaggaaatgtcttttgctgaggtcgttactgctattataagcttaaaatggaaaaacataataggcatatgagttatttttatgggttgatgcagtttccaatggtgtgtactaatttgagaaaatgaatgtgtatacatacaagagtaagtcagattgttagactcatccctcagtattccatatgttttgtgactgattttacagttctctctacctttctcatttacaaaaaaaaaaaagaaaagaaaatttgattcagcaattcctaaaa

SEQ ID NO: 720 - DNA, 531 bp, Homo sapiens; identical to SEQ ID NO: 719

SEQ ID NO: 721 - DNA, 531 bp, Homo sapiens; identical to SEQ ID NO: 719

SEQ ID NO: 722 - DNA, 301 bp, Homo sapiens
cacacacctatagtcccagctactcgggaggctgaggtgggaaaatgcttgagcctggcatgtctagccttcagtgagccatgactgtgctactgcactccagcctgggcaacagagcaagactctgtctgaaaagaaaagaaaagaaaagagaaaaggaaaaagggcatttaagacatctcacctactgaacatcctagcttcgcctagcctaccttaaatatgctcagaacagttacactgcctacagtctgagaatatttacattaaatatgctcggaacacttacattggcctacag

SEQ ID NO: 723 - DNA, 537 bp, Homo sapiens
tagacctgaaaacacctaatttttattttcaatttagcctggaagctagcaaaagcttttgcagagaactgaaactgtgtcacagagcaccagcactgtatttgttatcattttggccttcagttttattaatgcttgtttgatgtgttaagcccctagctaagacaaaaagacagaactttagggtttttgtttgttttagcagtaataaagtctagaataaaatgtttgctctataatatttaatggtgtgtattcaatttttaaaccaaaatttaaaagaaagaaatcccattctcattcagcactgtcaaatgtattcattcccccagacttcactggttgaatataataatttgtgtgtataaacagtcttcctgactgcattctctttaatattcatttatcaatttgggaggaaatttccaaataacctttatttgcaccttaaaaaaatagttttaaacgaagtcatgggaatggattgctctgtcttttactgacttttatatatgtgattccaaacctccctttaaa

SEQ ID NO: 724 - DNA, 1124 bp, Homo sapiens
gtctgacatcatggtgttggcagggccgtgctctccctgaaggctctagggaagaatctgttccatctctttcccttcacttctggtgctgttggtgatccttgatgctccttggcttttagatgcattgctccattctctgccttggttgccacatggtggtaacagcagttcctgtgtgtctgtgtctcttttcctcttataaggacaccagccatatttgattagggcccaccccactgacttcatcctaccttgattatatctgccaagaccttatttccaaataaagtcacattcatagagacaaggtgggttagggcttcactatatctttttaggggacacaattcaacccataacagttctttataactttaaacctgttagaaccaggctggtatttgtaatgcataatgagaaactgcagtgaatttcattaagtgtaaagcatcatatccaacatttgtagtttgttacaataacacattcaaaagattgatagactgcttttggtgtgatttttggattaattccctcttttgaagacatttgttgggcttagtttattttaaggaaggaatgaatagacctgaaaacacctaatttttattttcaatttagcctggaagctagcaaaagcttttgcagagaactgaaactgtgtcacagagcaccagcactgtatttgttatcattttggccttcagttttattaatgcttgtttgatgtgttaagcccctagctaagacaaaaagacagaactttagggtttttgtttgttttagcagtaataaagtctagaataaaatgtttgctctataatatttaatggtgtgtattcaatttttaaaccaaaatttaaaagaaagaaatcccattctcattcagcactgtcaaatgtattcattcccccagacttcactggttgaatataataatttgtgtgtataaacagtcttcctgactgcattctctttaatattcatttatcaatttgggaggaaatttccaaataacctttatttgcaccttaaaaaaatagttttaaacgaagtcatgggaatggattgctctgtcttttactgacttttatatatgtgattccaaacctccctttaaa

SEQ ID NO: 725 - DNA, 301 bp, Homo sapiens; identical to SEQ ID NO: 722

SEQ ID NO: 726 - DNA, 1124 bp, Homo sapiens
gtctgacatcatggtgttggcagggccgtgctctccctgaaggctctagggaagaatctgttccatctctttcccttcacttctggtgctgttggtgatccttgatgctccttggcttttagatgcattgctccattctctgccttggttgccacatggtggtaacagcagttcctgtgtgtctgtgtctcttttcctcttataaggacccagccatatttgattagggccccaccccactgacttcatcctaccttgattatatctgccaagaccttatttccaaataaagtcacattcatagagacaaggtgggttagggcttcactatatctttttaggggacacaattcaacccataacagttctttataactttaaacctgttagaaccaggctggtatttgtaatgcataatgagaaactgcagtgaatttcattaagtgtaaagcatcatatccaacatttgtagtttgttacaataacacattcaaaagatttatagactgcttttggtgtgatttttggattaattccctcttttgaagacatttgttgggcttagtttattttaaggaaggaatgaatagacctgaaaacacctaatttttattttcaatttagcctggaagctagcaaaagcttttgcagagaactgaaactgtgtcacagagcaccagcactgtatttgttatcattttggccttcagttttattaatgcttgtttgatgtgttaagcccctagctaagacaaaaagacagaactttagggtttttgtttgttttagcagtaataaagtctagaataaaatgtttgctctataatatttaatggtgtgtattcaatttttaaaccaaaatttaaaagaaagaaatcccattctcattcagcactgtcaaatgtattcattcccccagacttcactggttgaatataataatttgtgtgtataaacagtcttcctgactgcattctctttaatattcatttatcaatttgggaggaaatttccaaataacctttatttgcaccttaaaaaaatagttttaaacgaagtcatgggaatggattgctctgtcttttactgacttttatatatgtgattccaaacctccctttaaa

SEQ ID NO: 727 - DNA, 301 bp, Homo sapiens; identical to SEQ ID NO: 722

SEQ ID NO: 728 - DNA, 607 bp, Homo sapiens
gtttagcttgtacttgatttttactaatagtctaagaactgaaatccacagataactgtgaactccgtttagtcagtagtattactctctatccagctttttttcttttttttctatgcctataccactaacatattgtagaattaatttattttgaccttttctgtctccccccctccctttttaagaatttcttttaaagatggtgataagtaagtgaaactttgaaaggtaggcagtatcagatctacataattaagaactgcaggcaatttatggattactttcctttaaacttccaaagatgtaatagtataccttttagagatgtggctactgctctctggagagaattagggtaagcagattttcactcatactttatgagctcattaagtatgggcagttcaaccgtttagtaagtaaaacaaaatatgactattttgaagattaaatctgtttatagtaacctttagattatgtacaaaaaaaatttatgctgcagatatgatttttaattaataacttatggaaattaataacttactatggctgaactttgaagagagattatactcaagcagatactatagtagttaaaatataa

SEQ ID NO: 729 - DNA, 607 bp, Homo sapiens; identical to SEQ ID NO: 728

SEQ ID NO: 730 - DNA, 532 bp, Homo sapiens
acctcgaagatagtacaggtttggtttcagaccgctatagtaaggcaaatatctcaaagcaagtcacacagtttttttttcctagtgcatgtaaaaattatgttcacactatactgtgtgcagtaacactgcttcttaaaaaaagtatatacctaaacaagtaaatattttattagtaaaaaacagtagtgatcatctgagccttcagtaagtcatcagctttttgttggcatagggtcttacatccctgctgatgactgtggacttattcaagggcagtggttgctgaaggctgggatgactgtggcgatttcttaattaaaagaagacaacagtgaagtatgccacgttgattgactcttcctttcatgaaagatttccttgtagcaatgtgatgctgtttgatagcattttacccagagtagaacttctttcaaaactgcagtcagtcctcccagaccctgccgctggcttatcgactgagtttatgtaatattctgaatcctttgttgtcatctcaacagtgctcaca

SEQ ID NO: 731 - DNA, 221 bp, Homo sapiens
tttttaataattaaactaatttagtaaattcaagatggaggcgctttcctactgattatgcttccacctcagaagatgaatttggatcaaaccgtaattcccctaaacatacccgtctacgtacttctccagccctgaaaaccactcgcttgcagagcgctggatcagcaatgcctactagttcttcattcaaacaccggattaaagagcaggaagactac

SEQ ID NO: 732 - DNA, 532 bp, Homo sapiens
acctcgaagatagtacaggtttggtttcagaccgctatagtaaggcaaatatctcaaagcaagtcacacagtttttttttcctagtgcatgtaaaaattatgttcacactatactgtgtgcagtaacactgcttcttaaaaaaagtatatacctaaacaagtaaatattttattagtaaaaaacagtagtgatcatctgagccttcagtaagtcatcagctttttgttggcatagggtcttacatccctgctgatgactgtggacttattcaagggcagtggttgctgaaggctgggatgactgtggcgatttcttaattaaaagaagacaacagtgaagtctgccacgttgattgactcttcctttcatgaaagatttccttgtagcaatgtgatgctgtttgatagcattttacccagagtagaacttctttcaaaactgcagtcagtcctcccagaccctgccgctggcttatcgactgagtttatgtaatattctgaatcctttgttgtcatctcaacagtgctcaca

SEQ ID NO: 733 - DNA, 221 bp, Homo sapiens; identical to SEQ ID NO: 731

SEQ ID NO: 734 - DNA, 652 bp, Homo sapiens
tcctcagtagcataataataattttagctagcttgccatctggggacccttcctaagtggtagataagaaacttaaaataggattgtactttaccatcatatttccccacccagcactgttactggcataaatatgtgagcaagtgactggtgagagagtgatgcctttggcagggtatctgatggtgagatcgactgagaactgagtggaagagaaggcgaagtatcagattgccaaaagggcttttattcttagctcagcccttcacgtatcctgcaaagagctgctcagcaaaaggtgcttattgaattacacctcataacaggcagaatttgaatgctgttcatcacaggagctatggagtgcatagttttatagagagtatctccccgcaggcaagatacatagaacaggtgcagaattacagcatatactcatttcgcctcttgttaaataaaagcaaagacagtctcatgcgatcctgtgtgctgagtagaatatccattatagagcattttcttttatttttgttaatatttttacttgtagatttcccattaaaaaaaaaaaagtatagtcatttttccaaaccactaaaaaggacacttatattaaaaactgtttcagtaaaaaggtttacagccatgcttt

SEQ ID NO: 735 - DNA, 119 bp, Homo sapiens
ttttgttttgttttgtttttttaactaaaaagtaaagtttaatgttgaaaatgcaaacttggggaagacagaaaagatcacacacaaggctgtcacttcacacttggaaggttgcacag

SEQ ID NO: 736 - DNA, 420 bp, Homo sapiens
cctgggagtaaatattctgggacaggcacagggggtgtacagggaaagagtctttcctctctgtggcatctgggaggctttaggatgtgggaaagatggtctcctcatctcagttgcccctcattttcaggcagacacgtatgaaatgattacactcccctgaaagatcagcttctacataattcaagatcatcctcaatctctctcatcagagaggaagaaaagccgcatgaattatttacagaacactaagttatttccttttatgagctccaactttgtttttgtctctgcaaactgagattttgtttatccatgaatagtttccccaggggcatgaaaaatatgactcttaaattatgaatgaggttttttgtttcagtccatgttaactaaaacatgcaaaataaactatgtttt

SEQ ID NO: 737 - DNA, 3569 bp, Homo sapiens
gtaatcccaaaactttgggaggctgaggtgggtggatcacctgaggtcaggagtttgagaccagcctggccaacatggtgaaaccccatctctactaaaaataccaaaattagccaggcatggtggcgggcgcctgtaatcccagctactcgagcccaaggcaggagaatcgcttgaacctgggaggcagaggttgcaatgagccaagatcgcgctactgcactccagcctgggcgatagagcgagactccgtcaaaaaaaaaaaaaaaaaaaaaaggtaataataaaaaaaataaagtaaaggctagagctgcatggaaagaactcttggctcaggtaggacttagagccagggagtaggaagagtggcatgcactctggagtcctatgaggaagcaagatcccacaggatatgggaccataggtgacagggaccagtgaggaaggattgagaccccttgccccatcggcctgccacttttttcattgtttttctcttcccctctccttctctttcttcttttctttaactgggttcttttcgagtattctcaacaacagtctaggggcctggaggtgtggggaggccgcccacggatgcctagtttggcgctctgtgcactgctagcatcttcgtagggatgggtttgggatgggagcggggtgatgctctggttctcagggctggactccgggcttggaggggaactccctcttgcgagtccccagtcctgtgggggctgggcctggaaggggaactgggagatgcggaagtgcacgccgtcgggtcgcatctttcagtgcggtgcgagagggcccagtggcagaggcccagcaaacagcgcttgtcaggcggacctgagttcgagttctgactgtgccatctacgctatgactttggggcaggcgacccaccctctgcgcctcattaacccatgtactgcatggaaaataagcgtctgcctgggttagaagagggctgtgtgtgaagattcaaaggacgaaggggaagagtcctcgctgggcgcccagcacgcggtgagcgcccggccagtggcagcgcgctcgggctggggttgcgctcgggctcggttccgcgcccccggcagctgcgggctttcccagctccggcccgggcccttccgctctccccggcacttacagcggtctctctccacttctcccttctaggaccgcggcggctaggtcacctcctccggacgccgacacgcgctgccctggcaaccgtcaccagggaaacaagcgacgtcacttgcgcgttttcaacgctactctacgggggccgagggggcgccaagagttctgaaagtgacagaggcgctgatggcgcgctgggctggatccaagcgagcacgatctcgagtgcgctggagattttaaatcttctggagtatatttttaaaaaagttttgtggaccaaacgttctgcacagagatgcccattccgctctcctgttggggagttaaaaagcgaacgatctcaccatgaaatttaaagtagccattcagatatatttgaaaaatgtaaaacagtgtggggaaaggccatgttatgatggtgagtgaaggaagcaggacgcaatatagcaatgctaaataaataaagttgtgtttatttcaaactaggcactaaaacaagaccgaaatagaaatattaaaagtggttatatttgggtggtggaatagcagtgctgtgtttttatttttacactttagagaatttttaaaataatgaacatcgtttattttcataaaggaaaatacttgtttttttttttttaaatggcaccttccaatgtaagacactactatatttcagggcaatatgggggtgggaggcaaatttctaggaaagatgattcaagggagatttctttctatctatctatctatctaatctatctatctatctatgatagagtctcgctgtgtcgcccaggctggagtgcagtggtgcgatctcagctcattgcaacctccatttcccaggttcaagcgattctcctgcctcagcctcctgagtagctgggattacaggcacccgccaccacacctggctaatttttttatttttagtggagacggggtttcaccatgttgaccaggctggtcttgaactcctgacctcaggtgatccgcccaccttggcctcctaaagtgccgggattacaggcgtgagccacagctcctgcccaaatatttatccaggacttcataatttgaaaaccttggcagttgtttttctattttttttcctcataaggtgaatgaatacccatcccatagacatgcatacataagatacggcactagactgccatcagcactgcaggtataaacccgaagtttcctgataaaggaaaaatggatctttcccgttggtctccaattgctgcctggtgagctgagggtgggagacgtataatatacaggtggcagcaaagagagacaggataaagagtaggattcaggtagatgtgagcctcaaaggattagggttttttttaaatggtgtgtgtagtggggagtatcattcgtttgcctcatgaccacgatgggactatgtggcataggaaaaggaatagccaggtctacttagagggcttctggaaagcatggatcctagcagaaagccaggttttcattaaaataagaacatgctgtgagaaaattaaggatgcaagagaatttcagaaccgacattctagaatgtatgtattagaaagtttgggaaaggggtaacatttgctccagcaatccaaggattatttttgacgaggatatcatttttgcagtaacccattttttaaaaagcagggatgattttcctctaggtttgttacttttccacggtcaccactaaggctctcatgccattttttttttctgcccaaaattcttttgagaattttctttagtttataagcttgacattttatcatccaagaagctggcgaatccaatctgggtcaccagtatttcctcatgtacagtatacagatgtttgttaattccagcccactttgtttctctagccagaagtatctgtaggacactgccctttgttttttgctttttaatttgaaattatattgagatttttatagaatcacatgcagttgtaaaaaataatagagatcccctgtatacttttccagttctccacaatgatattttgcagaactttagtataatattacaaccaggatattgacatcgatacaacctactcctcttagatttctccaatttaactgtacttttcttttgatttatcacgtgtcagtttgtgtatccatgaccatcaagatatcaaatactagccgggcatggtgactcatgcacgcctataatcccagcattttgggatgctgaggcaggcagatcacttgaggccaggagttcaagaccagcctggtcaacatggcaaaatcctatatctactaaaaataacaaaaattagccaggcatagtggtgcttgcctgtaatcccagctacttgggaggctgaggcatgagaatcgcttgaactcaggaagtggaggttg

SEQ ID NO: 738 - DNA, 198 bp, Homo sapiens
tgttaagtgaagaagccggtctgaaaaggctacatgctgtataattgcaaactgtataatattctgaaaaaggcaaaattacagagaagtaaaagataccagtgattgtaaatcccttctaaatgaaaaatatcagtggtttccaggggttggtgggaaggaacaatgaacagtaaagcctagggggtttttggggag

SEQ ID NO: 739 - DNA, 23030 bp, Homo sapiens
taattagcaggtgagctcctggcagggctggggtttcatcttctgggctctctgcaaggtcgtgcccggcacgggccaggaacaatttcataaactcgtcatctagacggcctttgactgacaccatctctccgtgtggaggagccgctggggtgcacggggcaggtgtcgtccgtttcaaaggtaaaataacccagctgcagacctccagaggccgactagagccggggtcagaaaacaggttttccctctcggggacagcgcccaggggaccggcattagaacatcggctgatgtttcatctggtcagggaaccatccagcgcttagtacacctggcgctaatcggcggggattaatctcacaccccgcagctggcggaaagcagcgggaggaggcacctagccctggggttgagatcccagttcccgcgtgcgcaaaccacgcccctgtagattctcgctgctgcgtgttcgcgcgcgtcccggagtgcgcatgcgcagcggcgggggttgttccggctgcctttcactgaggggacccgccagtttctaactcagtggcgtttgccctgattcccggggcctggctttcagcgtagcaattctgccggcgaagaaggtgagcgcagtgctgtgtggcagcagagctccttaggacgaggagcagcgggacgaggaagggcagactggtgaaatcgcaaactgggcgtctgttccggcgccggacccctatttgcaaaggtgggtggcccgtccggagcgggaaaacattccggaagtggagggccgggccagcgtgattgacaagcgggaacccctgtgtggggacgggtaggcctaggaaggttgtgcctgcggtggaactgggcggtgcgcagaagtgggcattaacagcagccgcgtgtctgggtcttagatttggcccagctgtgttgagcttttcatggattatcttacgtagataagacactgcaacagtgagtgagcgcttgtaacccacctgtctcttacggaaactgagccccagcgatgctaactttagcaaggatacagctgggatcctaaacttggcaatcagagcccagagccgataaagttagctgcatgagtctagcttcccccagggcgggaatcgaggcggagcagggtacagtacggaggccaggaatgagtgcacttgaccagattgttgacggaagtgtcataaaaatggacttaaatgctgataagcagctgtttgggttccacacagggtgcgagctcaggatgcacgttggaggggacacagggccagagcaaggtgggaatgcgggtattatgggccaggccatcctccagctggtggagcaccgcagtactgcagtgtgtggccctggcttaacagcagtgcggaaaagcttttttcttggggctgtggtgctttccaggtgtgtgaagttaaaacattttagggccatacggtagatagtacctgccacatagttgtcttggtcagccccggctgccatgacaaaataccataaactgggtggcttagacacagaaatgtgttttctcacagtcccagaggcttgggatgtccaagatcaatgtggggaggacacaactgagcccacaacaatagtctgtactcagtaatgagtgataattggggactgaagaaaatgaacacgttaagaactaatatgttcctgaagtgctttcacaactctaacctcgttttatgagcgtgagctttgctgtcctggtgtgtgccttggcactgggaggtgatggttgtcctccacacagccaacctgaagagggctgaacaagtcactgcaaatgtttttaatagggcttagtgaatccgttatactcagatttatctaaacctctatgatttagcctgtgctgcttctggaataatgagatccataattaccactgatggggaagtgaaataatacttacgtttcttctgtattgtttagtgttgtcattctagagtttggtaaccaagtctgtcttttttatcccacttatcctggtgggaggaaaagtgaggagatagaaagtttcaggtggcttgggggtctggcagatgtggttcaaatcctgagttcaagcacttgctgagtgaccttgggcaagtcatataagtttactgagtctcagtttctttctctataaaatagagcttataaaaataccacacagggtttttgtggggttatctgaaaacggtttgaaaccattaaagaactggccatttaactaataggtattcaagtcatgggacctccgttacccagcctcggaagagaaaccttcacttacagccccgatgtctggctggctactcattcgttcatcagatttttgttgaatgcctatgaggtgtcgaagcacctagttctgagtcctggagccagagaagagcaagacagacaaggttcctctatttatggaacgtatattccagtgaggaagaataaataggttcagatggtgctaagagctatgaataaattaaatacagagtaatgtgattttttaaaagtgacttagagcaagctagggggtgaggagtgggggtggtgtttgaccactgtccagcggccagacagccggagaggcttctctgaggaggtgagccaaagcctggatattgaggaggactccttctccaggccaaggggagcagcaagtgcaaggcccgagctgagtagatgaggctgggagcctgaccagtctcaggctgaccagtgctctgtcttgagaggagctgctggtcagctttttgtcttgggattcagaacgaggagacatgaagactttttacttggcagtgggagctgaagctgaaaggtccaggggctgatgaggccacgtgtaagcgaaagtttgggataagcagaaaccgagtgcgctgagggagtgagattgtggctgtatccggcacctggctgagcaggagagtgaaccccgtgggtgtgtgtttgctggtgacgttcctggagctgtcttgaagtccgagctgccttgcagcttgtagtctgcctctgtttttggctttcccagatagtttcaattcttactctcagtttgtgaacctcccttcagtgaacctcccttcacttatgctggatatctcttgcaaccggatgagcttcactaaagcagagtcatttggacctggattcgaatccctggttttccactttttagctgtgactttgagcaattatttaatttctgtaagcatcagtatccagtagctgtatccttatagtgttgtacagattaaatgagataataaaagcaaaagaccactgtagagtgtttaacacataggaggtactcaaaaatttgttaggtacctttcttcccctttccttcatgtgttaaagctttttcagtacatacccctctctcaggattgaattgtaaatcatgttttttgattacccttcttgtaataattcctctacctctgtagtcatgtttttcttttttcattttttcttgtccccagaatgtctaacaaaacagccaaatatacctctgtgaagacagagggtaaaataatgctagttctgtgagttctctcttcttgtgcaaatccataaactgccaccaatctgtagtcattttaattgcccctaaaccgaagagcatcgtggcaactacctttcccctcgtaaatagagtgacactatcactagtcttattgaggccaaagttataaagatgggctctcgatctactaatattagtaaaatgggtttgggacttactaacatttgtgcttagaagagacagacctggcaaagagcttggagaagtgagttccaaagagagaggtgtgggaaccaggatggaagagtcaggcctccagatagcgtttacttctcctttcttccttgaatcactgtctcagagataattaggttcaggagaggagaaaaaaaaagatgacgtcaacgtggagcagagtttttcttagaccttagcctagcaaggaaagagaaatgcctggtctcagtactgggaagctgttccagccagagccccgtggctgtgaagagagctctcctgtctggaaccaaacagaaagctcataggtctagaggccagaaaagttagtaggtggtggctctgttcggtgctggaaatggaggccaggatgaactaagaagcaaactaaagatacttgtaagataaggacgtgtaggccgggtgcggtggctcacgcctgtaatcccagcacttcgggaggccaaggcgggcggatcacgaggtcaggagatcgagaccatcctggctaacacggtgaaaccccgtctctaccaaaaaaaaaaattagctgggcgtggtggcgggcacctgtagtcccagctactcgggaggctgaggcaggagaatggtgtgaacccgggaggcggagcgtgcagtgagccgagattgcgccactgcactccagcctgggcgacagagtgagactctgtctcgaaaaaaaaaaaaaaaaagatagggacgtgtatgttaacttgcgctatccaaacaacaagctgtgcttatggtcctctgcctgtgcgtcatgattttccaggacttcacaacgggataaagtgaagtagcttcggcttgtgaatgtgcattgcagagacgtgggagaagaaagctgcaaaagtcattataagcaacacccttgatcttaggggtgctggtctgtgagaagagagctctaagccttttgtagaggcattagaaaggtatcggagccacggtgaaatgcaggggagattgggtttaggggctttcctggtctgcattctgctacagccgttaaatgccgctagatggagtgcgtgattctggtatggcctcacgtggacctgctgcgaaggatggagagaacatggtctctgcttcccagaaaaaaggagaaatttggtaataagtgtggagactgctcttaaataatgctccagatttcaagccacttcttcctggaccatgagagagctccctaatgttgtatttatttttcctaggtccatggctaatgaaacacagaaggttggtgccatccattttccttttcccttcacaccctattccatccaggaagacttcatggcagagctgtaccgggttttggaggctggcaagattgggatatttgagagtccaactggcactgtgagtatgaacagtgagagatactgaaaaggacaacttaacagcagccgtactagcttttcctgtttgcctatccagagattttcatagtttgaagttgggcagagtagtctctgtttatctgagtaatagtcacttcctctattaaagtcttttttttttttttttgagacggagtctcgctgtgtcgcccaggccagagtgcagtgggacgatctcggctcactgcaagctccgcctcccgggttcacgccattctcctgcctcagcctcttgagttgctgggactacaggtgcccgccgccacgcccggctaattttttgtagttttaatagagacagggtttcaccgtgttagccaggatgatctcagtcttctgacctcgtgatccgcccgcttcggcctcccaaagtgctaggattacaggcatgagtcaccgtgcccggcctaaagtcttaaacatagctctgtggtctgagaaaaattaggctgaagtcattggtgcctacctattacggtagatgagacggctttcttaccaactcttttccctcccgttccccatccttcaaatataattctaagttttagtctctgctgagtgaaccagtgtgttatgattatgttttgaacataattttgtcttgaacaatatgtcttaatattctgttttttctagttaataattgcccttttaaagttagtttagtttttaatatacctatgccagttcctcccacatcatccagtggcctctcaatatgattttccatacagataactcctgtcttagtcggccaggactgccatagtaaaataccatagactgggtgacttaacaggaatttattttctcaccattctggaggctggaaagttgaagatccagattctggcagggttctggttctggggagggggtctcttcctggcttgcagatggctgcgttcttactgtggagcaagaaaagacgaggaggagaaaaacaaatctttggtgtctctttctcttttatgaggacaagggctgctcccttatggctgctccgttatgacctcctttacccttgaaggccagatctgtagtagagtcacatggcggggttaggatttcaacatatgtttgtttgttaagatgggcagtctcactatgtggcccaggctggtctcgaactcaagcgatcctcccctctcagcctcccaagtacctggtggctggcaagatccaagattactggtgcacaccaccatacacagcttcttttgttttgtttttgttctttaaaaacatttttttaacatgcattttggtggggatacaattcagtccacagcagtgaccaattccatttttaccttggagccctcctggaatcctccatcctttccctgtcatttgaattagttgctcctcagactgacttgacagatttcagcatgagtgttaatggggacagacggccgcacccacaccacatcagggtatacgtccgtttggaggctttcctcaaacgtctggcagccctggactgcctgtgtatgctgaagaacagggcacagaaaggctgagtctgcagggcactggctgtggctgccaggctgggctcctttgttgggggcctccagttgccagcacatctgtgggattttccctagagtcttcagtctctccagagcaggtgcctctgagccctggcccagcaggtacagacgctgaagcccaatagccggtcttccgggaggtggtctggggaaggggatccaggtggagagtccccctcagtgcctgctttcagcctggccctcctccccctccctcttgcctcctcaatctgccggttgcctccagggctctcctagctcagcttccacttagagcccacttcctgtcttctgcaaggagcaggagcagggattgcaacctgagaatctaattgttcttaaaaagaatttcaacccgtccctttgttttcagtggcctgctgtgttcctaccacttcctgagtctttctgagaatgagtgggggagatctctggggacacttgggcttgagtgtctctgccgaaatcacttccatgtctctgccttctttccctctctcctaaaacatattactccttccactttctttttgtgggtgtaagcctccatattactttggttaattttagtgtgctttggaacacagatgagtgcatgttcattctgccttgtttaattttagagacagggtgttgctctgttgcccagggccgagtgcagtgttaagatcatggtttactgcagcctcaaccttctggcaacaagtgatcttcccacgtcagcctcctgagcagctgggactacaggtgtgcaccatcacacctagctaattttttaatttgtagaaatgagatctcactatgctgctcaggccggtggtcttaaacccctaggctcaagcaatcctccctccttggcctcccatagtgctgagattacaggcatgagccactgtacctgacccctttcaccttgtttagcctgacaacccatcttctccctctcaggtctttccatctcagtcttctgcactccaggcttctgcgtcttcttcctctgctcagcctttaattgtcgatgtttctggttctatagcttcatcttcttgtgtgcagtctctgtgaatgtaccctgtggctttattacctttgacattcttctgtcttctaaatcatctcctgaatagagtgttttctcctgtcctgggtgtcccgcagcccatagaagcagccatgctgtgggacaccctgagtggggtttgtgttacctgttgtgcctaccatgcccttccccgccgtggatgcacaggtgccccaccttagctgccccagatgctgtttatccttgatagtcaccttttaagccttatacaggtctatcaagttgagtcaccattaccacttggtgtgtgctgtgccttgtgtaatactgcagttccgggagtcatccaacctggaatgcatgctttgcggggatctatgatgccctcgaattgtatgttacatgtgaacctgtgagcattttctaggggctctgcacctttgtgtcctcagctctgagccccatgcttgctgcaaccagcaggtgttcagagtgaatgaatttgcttatcttggcataaatcatgtaactgttgatgataccccaggaaggtgagcctttggttataaatccttttaacattttccagtctaaaagttttgtggtcttattacacgatgtagaaaacagtgggcctcagttattcttttgctgttgtgccggagtataccacggttgtttttgaaagataactttgaccatacccttaggaacttcctcagctcactttcaaatggagggcactggctttctaaccattgtgtctcccagcccagtgacagctgaagctgactgcttccgatatcacagacagcacagaagagccgccctccaggtgctgctgggaaatgctgcctggaactctttgccatttactttctatcaaaagctgagggaaatggtacatatggggctttcctaaaaatatgggatccatccatttgtcaacaatgtcattctatcctatcccagggcctttcaagattttgatgaaaactaatagatcccatattccagaataatgctattaataattttattattattacttaatgatagcaaaaagttagctaactccaaccgctcacttgttatttgccaggtaatcctctaatccagaggatttggccttttgtgtgtgttaatgtcctgcttgcaccagctctatgaggaaggtgccgctgttgtcatttccatttctgcactcgtggaaacaagcgtagtgaggccagcctgagccacagagctgcaggtgggggagacagctggaaccctggcacctggctgtggagtttgagactctgactcctgcgccgcgctgctgccccaaccgtagtcatacgaggtgtttcaccccgccctggatactctgagatcccctctgggttcagcaggctcagagagctgactgcctggagcagaaggcatggggtcctccagagactcccctgagctgagttcccctgtggacaccagggccgcctccttgtggcgctccctgaagggtcctctctggaagaactgtattggttccctggggctgctagaggaaagcttcacaaactggggcttaaacaacagaaactgacatcccacagcgctggaggctggagtccgagatcaaggtgtcagcatgcttggtcccttctgagggtcgtgagggaaagatctcttcaggcccctttccttggcttataggtggcgtgttctccttgggtatcatcacatcgcctgccttctgtgcatgtctgcatccacgtgtcccctttccaataaggatattagccctttaggctgggtcccgtcctagtagtctcatcttaactaattacatttgcgacagtcctatttccagatcaggccacattctgagatgctgggggttaggatttcaacacaggaatttggaggaatacaactcaatcaggcttatggaaaattctggtcttaagtcaagggtagtgttctccagtctgtatatggaggcgcacacctatggtcccagccacttgggaggctgaggccagagaactgtgtgagcccaggagttccataccagcctgggcaacatagcaagacctcctctcaaaaacagacagagtggtgtcttccagagtgattagtttgcttaaaaaaaaaaaaacaaaacaaaacacaaaccgtaagcactggcgctcatgactgatcatcctgtatccacgcacgagctgcacgaaggccgcgcggtcactctggctccctgttggcgagtacctgggatttcttgctcagcattttggggccttaattcttttaggggactttttgtctaatgtctccccttcttctaattatgtgcgatatttacatagaatctgataaactgcttcaaatttgttttcagaacagtgagctggataattaaagaagctttttcctgcttcttgggcccagtttccatttctttcttttttctgtttttcctggctattctagtgctaatttccttcctttcctttcctaggctggtcttagagcatcctctcctatgtacagccagaccttctttcaagcttttattaaaatggggaaaggtcatttgggaggctttgttgttttcctgtttctaaagatcatttttcttcctgcaggggaagtccttaagtcttatttgtggggccctctcttggctccgtgactttgaacagaagaagcgtgaagaagaggcacgactccttgaaactggaactggccccttacatgatgagaaagatgaatccctgtgtctgtcttcttcctgcgaaggggctgcaggcaccccgaggcctgctggagaaccggcctgggttactcagtttgtgcagaagaaagaagagagggacctggtggaccgactaaaggtgagacctggggtatccggaagtgggagtactggaggaaacagggcttcagcgattgttctggggcgattccgagactcaggcagtgcatgctcccctgccgttgccgtgcctctcagctcttccctcagctccttgggtctatggtgctgccgctgtgctgtcttttttgagctggaggtcagcaggccttctccacataaggaactgttggtgcccatttattactcacctgggaaaggacctgatcattgccattggcagcatggttcaatggctgcaaatggatctgatggagagcgtgtggctttgggaggagtgtgccgccttccgcagtgagcagcgaggctgggaccggcagggatgaggtcccgggaggggatgcggcagcccttgagtgctggccggggaaggagagatgcccccagtgaggaggcgccgggctgagtggcccagactccttaggagaggcctggttttgggcttccttggtgattttccttcatgtctgcctcctgtaggcggagcaggccaggaggaagcagcgagaagaacgcctgcagcagctgcagcacagggtgcagctcaagtatgcagccaagcgcctggtgagcctcatttcttggggggcaggattatgtccaggcagggttgctctgcttggaggctcatgggtgcgtggtcagggccttggtctcccctccgtgaccctcactggctatgtgctcccgtacagaagctgggctgtgagtggttgaggcgtggatcctaggagtcgacctctctccagccaggcagccaggcctatgtgaatggggcgtggtgtgctttgtctctggcatgtggggaggtgggtactggtgctgagacttcttcctccctcaccacctccactacccctgtccagaggcaggaagaagaagaaagagagaatctcctccgcctcagcagggagatgctagagacaggcccggaggctgagcggctggagcagctggagtctggggaggaggagctggtcctcgccgaatacgagagtgatgaggagaaaaaggtggcgagcaggtgagacagaggcggtagcactaccctgccccaggccaggggacacccttgaagacagctctttccctcatgccacagatgccatgaagcacctggcaagaggcatggtggcctctgccctctgctctaagccgggtccttcctagggtccatgagtgccagtggcagtgaggacagtcaccggcctggcctgtgtcctctcagctgtcctcacggcagctcaggcagggcaggaacatttgtgtctgcgccttatacacaaggaggctgcagccccacaaggagagactccttggctgaggccacaagcctcggcagtggagagctgggctagaactcagctggcctggctctagatctcaggctctgaggcagctgactgcactgggtaacctgtgaggtgccaaccatcaaggcgtccttagcctgagctttccttctcccataaagcctctgttggtccagactcaaggtttccacttgatgagccatgagctgctgggtgacttagccctgagcaggccacccaggccatttcgggcccacaggatccctggtcacagccctgttcccattcacactggaacctcaccaccatccctgagtgtctgctctgagtatggcactgtccagatgctgtggacatagaagggaagaagacatggaggggacagttaatagacatgaaaacaaatagcacctatgtgaagtcagcatgtttgcctacaaggaaaacaaaatggtgatgtggatggggtggggggctgcacctgatgatgagtcccgtgtgtcctgtgacatcctggccaccacatctgtcggagggtaactgcaagaccagagaccctccatggatattcctgaaggttcatccccggccttcacagtctgtctgcagggcgccttctgatgccacctccagccgccatccaccagacgccagcttccccgctgccctgaacttcctccagcgcaccaggccttcctctgtcctgtctgaggatttgctcatgcaacgtgctgtggccaaacaccctgccctcctcccttggcagatgtcttcctctcctttaaggcctggctcaggtgtcgtcttggtggcttcgggtgtcagctgctctgttttgctcatgcacctgcttgtgcttctgttgttgcctcctctccctggctgggctcgagctgcttcagggcaggaaccacgtctttatagtttgatgttcccagagctgacccagtgtttggcataggggtgtgctcaataaaatcgagttgacatgaatgagcagatgctgcctcgttgcagtctggtagtgtaattccaggctgcgcatgtgaacttcgacttctgcccctgcccagggcagagaccaccgtgttgctttatgcctcgctggtgagagggggtcataaacagtttgtgctccatgaacccttcctgcccgcctccgaggtcatgtttctgctccctctcttctcccttagagcccgtggggacaaggcagagaacttgagtggagatggaggtggtgaatattaaaggaacaaagtgctccttcaggtctgggcaagagccatggatcctgtaggtcagcttctggggcttcccatgccctcacgtttcaggagataacgtgagcctcggaggacctgagttctgaatagaaaatttttgctcttcatttcttcacacacccagcctctcagtgagctcctgctggctttgtccagcatgcgacataagattgaatccaagccttttaagatagagccgcctgctctttagtgaccatgaagccaagcctgtaataattactcttctgatagcccaagacaattgtattctgttttgttagaaaggaatttcgaggtgaacaaaaatgttttctttttatgtgatgttgccataggtagcgtgtgcctgtcagatggttttgtgttttctgaggagcatagactagtagagctagctcagcttcaggccatgggatgcagggctggcttccctgccaacgcctggcgctgatggattcttcccgcattgctgggaagggcagactgaggcactgacacaagaagagttgtagctggtcataagtgacagcatcctctgttcactcgattggtcagttgtagcttcatccaggagatggtcatggggttcctgctgcataccaagctctaggtgaggccacggggactcagcagaaacaaggccgacctgggtcctcccttgtggacatgacagtctggggagatagaccgagaggaagcgattttgaatgagatgggtgtgaagagcaggggccatgaatctgtgtcagagcagccaggcctaccagggaaggtcaaagaaggcttcctggaggaggtgatgtttctgctgctatctcagagttgactgggagctggtgaggggagacaacattccaggcacagaacatccgaaggcctgagatgatgaagagcaaatatccgccctggggcctcagaggggtccagcttgctggagggagggcagagaggagagcagcctgccatgagtcccgaggcttccgactcaagacttgggttgggggtgctgagcccctttctcctttttacatttccctacccacagacctgagcggccatgggaggttggggttggcatttgcctgggggagtttctgagcgagcagcacctgctaccttggtggaacccattgctgggaatggccagggctcagcaccagcgctcagcagatgctcagtgcgttttgctgagtttgctgagggaagactgttttctgttctctctcacacacacagagtggatgaggatgaggatgacctggaggaagaacacataactaaggtaacacaagtgtcctcagctggtgctgtgctgggggtataggctgggctgtgcacccctggggaggaggctggagtcacttggctacttctcaccctcctctccacaaaggaggagcttccagcacttggactccgttgcttcttgcacacaaccctggtcctaagttgctcccttggccagctgcagtggaccctggagtcctctcctggggtcagggcctggggagtcctctcctggggagacctttcctgggaacagggacctgaggagacctctcttgagtttggggcctggggagacatctcctgggttcggggcctggggagacctctcctgggggcagggccatgcttgccaccccagggcatcgaggaacagctgttctgggctgaaatctgggtgttttctgtccctgctgggtggtacgggtaggacagacatgagtcccctgccctttgggtctctcatggtgtgcttctccctttgtctgtgttcccatttgcatggagggctatgggttgtgtatggtctgacatttcccatttggtttcattgatttatgacttgttttctgtcggaagtaggtattttctttgtattttctttttttctcccttcactcttgccttagaggagtagagagagggtattctggtcagccttcctttttccctttggggatgtgtgtgacacactccctcccctcccaccaacaacccaccctccccaagtggggaccctttgccacgggagatggtcacccatgtccaaagattggccaaccccccaaaagcggttgattagaggctggatatgactcgtggaaggagctgcctttggggcattcccttgaacttctggagctgtgggtgacttgggaatccctgggtccctcgatagatgcctgacatgggacattgctgtcctgcctcggctttgtgcattgggagccactccctttccctcagcctctcaggccctggcgtgccttgatgttagagaatgctgtgggatgttttggttctctctttgaagcgcctttctttctctctgctagatttattactgtagtcggacacactcccagctggcccagtttgtgcatgaggtgaagaagagcccctttggcaaggatgttcggctggtctcccttggctcccggcaggtaaacagtagccagtatttccaccaggggccatcctgctcctttcgccacaactttgtcctgctcgtccaggccttgggagacgctgggtctgtgacaggctgaaccgtgtgaggagcagccccctccctgacctggccggcccagcactggaaggcaaaggagaggtggcggggcaggtccacgtgtgttggtaggatgtcatttagctggcaccatctttttgcctctttctttctcctttgctgcagaacctttgtgtaaatgaagacgtgaaaagcctaggttctgtgcagcttatcaacgaccgctgtgtggacatgcagagaagcaggcacggtagccactgggaccatggtgtagccgcaggtggtctggagagagtgaggcaggggtggcagtgactgaagaccattaagtgtctttcatagaaagaatggcagaggagaccccagttccttcctgagtcccctctccttgggaaaaagtgttcctactctctgggtcagtgtctggtccgaatccttggcttggagatgattttacgggctctttctggagaacagaagtaaaaccttacagtgttccgatgagaccacagtaggcagtacttgggagggtcttatagaccctaccccatggaagtgggtctcaacattacacaaccccctcttgggcccgtggacagttgctgtcctctctgttttctctctttgtgcctgtgccaccctcagagaagaagaaaggagctgaggaggagaagccaaagaggaggaggcaggagaagcaggcagcctgccccttctacaaccacgagcagatgggccttctccgggatgaggccctggcagaggtgaaggacatggagcagctgctggcccttgggaaggaggcccgggcctgtccctattacgggagccgccttgccatccctgcagcccaggtgagggccctgcagggccagaaagccgctcttgactctcactgtggtctaggccatgaggggggtcctcatcacactgtagtttgggggatgccccccaccgtggtcaggttgatggcaccttaacccattctctcctgatgtgtgagttggaggaggcgcgtgggatcccttggggtctccaggcagcagggccagttggcattactggggatggtatttaggagccaggaaagccggtgcattcctagtgaaaccacagggagaggggggatgccaggagctgagaagagtgtgctgcatacatctatttacaaatggctttccaagtgatgctcccaacttccatgcctatgatgtgatggaggatgtcagtgatagaaccattcagttttccagtttttcctttttgtaatatcagtactcttaactggaaagctttccctaacttacacctacctgcagcacgtgagaatactgtcttctctgcctcaacttctcttgatttttaaacagaaggaagaactgctaatgtagcagatcaaaagtagtatctcactgttatttggtgggtgcagtttcactatttccttgctacttctttaatttgagtgactttggaaacgggatatcactagtggaaaattctgtataatccagaaaaaaatgtaaggttttaaaagattcagggaactaagtaaccatttgcacagcagctaaatgctcaccagcatacctgctgagctgtgtgggcactggcagagaaactgaggaaagctgccaggccccatggtgtcccaggccttccctcccgtctgtttgcctttagagcaagattagtgctataggcatttatacacaaataccataatatggcccaaaatctttacaatttttgaatttttaaagtactttgaccatattttgcttttatgttaatagtattccagtgaaattctgtgcatggggacactggagcccagaaaagttaagtgactcatattttctcaccaagcgtgggtgatggagccattcagttttccgatattttattttttatatgagtattcctttaactggaaactttcctaacaacaaacacctaaagatgtgcagagttgcttttatttttgttaccccagctccacgccttaaccctcactttgaaataggatgtatcaaccctattttgcagatgaggaaagcaagagtcagagaggttagacaactcttccagagtcacacagctggggagtagcagctccaggagtagaagctggggccgcttcctggtgcaccgatggtctgcaggtgtttgtggaaactcgggggcctccggggcgaccttgaggacatggacaaggctaagcaggggttcccttcacccagccctgcccttggtttactcaggagtcagaccagccctagtttcctgtgtttcatgtattggcttttcatgtgaaactcgaggagagcttgtccgttgccacaagctgtttttcgaatgtctctacacagtccaggcaggaaatagaagcactcacatcaggagctcagtgtcaggcaggcaaggctcctgcaggggagccccgccctgctcaggtggcctcatctcccctcccagctggtggtgctgccctatcagatgctgctgcatgcggccactcggcaggccgcgggcatccggctgcaggaccaggtggtgatcatcgacgaggcgcacaacctgatcgacaccatcacgggcatgcacagcgtggaggtcagcggctcccaggtgtgtgggcctcccctccccgggccagggcctgctgtgacgtaaagggacttggatggttcctccagacacctgggccaagagttcctccggaggtggggcttgatagagggtgcacgagtcaaggcggtgacctcatcggaggctgaccatggctttccagtgcatcgggggaccccgctatgacagagtgcctcatttccctgcacctcatctgcccccatgctcctgagtccctccagccctggatgccagcagccagttctgtaagccagggagatggcatgtgtgaggcagaagtcccctcaggattggattttgtcattactgaagttgtctggaggggactgaattgaggaatgctcaagatcagcgcaggctcctcctgctgccctatcatgcgccatgcatggcaccaggtgtctctggtcttcacgctgactctgccatgggtgtggtgttcctgttttacattggaaacttggagattcaaagatggtcaagctctgtcctgaggtcatgcagctcatgagtgtggagctggggtgtgcccactggtttctgactgtgaaaacccccacgacatcccaccagctctactgacctgtgcctgggctgaattgaggctgggatgtgatggtggccttgaaccatcactctttgtagactccaggtcttttcccaacccggtggaaacttagcagggagattccatacttgaggaattcagcctcttgctttttctctgacccacagtggacactggaggaaaacttcccttccttcccttttctcttagctcccaccagcctaagggctgtggaaacccgtaccttttgtctgcagccagccccctctcctccctttggtggcttcctgtgtgtccagggccagcatcttctaggtgaatctaagatgtcagtaccttagccctcagctgcttgctcagagcctggtttgtgttctttccccagctctgccaggcccattcccagctgctgcagtacgtggagcgatacgggtgagatgtgaccctctgaggtagtgggacagtcccttggtggccccctgcgtgggcctctgagaggcaggcagcactttggttcccacctctggcccgggctgtggcggggtggagctgcatgccattcatgtcctaggcacatcatggtgtgtgctgcacacagacctggaaggctggggactgaccgctggctctgaggcctggggccgtggccagcctgctctctgggaaaggatttgtagcttgtgacccagtttgagaggcaccgggcagcaaggcttccactggggtgggcggggcgagtcgccatcagggcaccaccacttaatgtccgttggcttcttctcaggaagcgtttgaaggccaagaacctgatgtacctgaagcagatcctgtatttgctggagaaattcgtggctgtgctagggggtgagagcctcgtccccctgctgaccccgggcctgcaaaactcgctgggctgctttttccttggatgcccatcaggacacctcagttctctgtgtttttaagaagggtcggccgggtgcggtggctcacgcctgtaatcccagcacttgggaggccgaggcaggtggttcacctgaggttaggagttttgagaccagcctggccaacatggtgaaatcccatctctactaaaaatacaaaaaaattagctgggagtgttgccgtggcctgtagtcccagctgctccagaggctgagacaagagaattgcttgctcaaacccgggaggcggaggttgcagtgagccgagattgtgccactgcagtccagtctgggcgacagagtgagaatcagtctcaaaaaaaaaaaaaaaaaaaaaaaagaagggtcttggtcattgatttagaaaattcttgttctttgtagcttagttgagttgtctgacttgagctttatttagacccatgggttctttgcccatgttctgaggactttttatttcaggccctgctctggggggatattaaggatacagcatcacatagacacacggtgtttccgtgataggcatagttctgtgggttgttcgaagcacttgcatatgcggttttgtgtgccctgtgagaacgcagtgctggtatttgaatccttgttgatagacgcataaactagagctcggagcaagggctgctcccagcacgggagcctgggatcttctgactccagctcccacgcctctttgcatgaccctgtcacgtccccttcttttatgatggggcacccccttggaaggcgtctgtggaagtggaagctgcagaaagcctgtgggagctcctggcgggagctggtctcgtgttgctgctctgagccaccagctctgctttgcctcaggctcaccagtggcctgggcagctcctctgtgctccggtgccctgcataccttggtctggctgctgtgtcccggcctcctggagaaggggtgaaaaacatgaacttacagggctttgggttccacgtgcaagcacgtgagtcagacatgggaggctcctggacccacctgccctctcagtgggtccgttgcatgctataaacagtgaaaagcaaaacaaagccatttaaatacagatgctcttcttacttgatgtgcagtgtggagggagagaagatagggaagggttgggggtcctgagaaccagcattgtgacctatttccattctcttttttagggaacattaagcaaaatcccaatacacagagtctgtcacagacaggtaagagagttgccctcagagggcccagagctgatctgagccacttccgagcttaaccctgggactgaaacctgaggcttagggtgaagctcccaaggcccttcatgtgtttgttctcagggacggagctgaagaccatcaacgactttctcttccagagccagatcgacaacatcaacctgttcaaggtagaggtttccacctttccacattccacatccaatttccttcctgtcaccacctgtgggtaaagtactatgttaagactgtagaaggaagaaaaagcaaaacagatgtgtaattacttaacccttaacgcaacatgcctgtgagacaaaagtcatcttcttttagagtgaaggccacagggatgagggatgggtgagaaagggacctttcttggtgccccatagaacagatagagactccaggtccttgctctctcactccgtcttctggcacagtctccctcaggcttatggacaggaataggacgttgatttgttctgtgcaacccctgtcacgtcttcccacttgggccttgggtctggttgcagcctcagacctctgctcactccaggtctgtgtacccagcgctccccagatgaaacacggccactgccgcctgaaccccaagctcgtaactcaaatcagcaacagtgactgcccccgggtacagggttctgcctctgttgtaggcggcatgccatgtgctgtgctctgagctaggatatccttttgccccagcaaggaaagcaaacaggcccgtggaggtgacttcaggagggtggcgagcacaggcttcccacaagtgagccaatagcaagtggcagagacagcgtccaaacctggctgcactgacttggggccccacattcttcccatcctgcctgccttttttttcttaaaaccagcttttcccctgaattacacatttgggtcactgtcactgccgccatccctgccagacaggctggatccaggtcatccttgatgcctttctccccttgtctcccacatgcctgtgacagccgccaggcctgacagcctgagacagtcctgccgtccctgcgcttctcccacagctgggacatgggtgcaggcactccttctctcgccttccctttgccctccttgctttccttctcccctcttcttcccatgggtctcgggtctcatcactcaccattgagggaatcctcatcgaaggacgtcgctctttttagaaaccggtttaaaggctccaaactcctcatctctgcatcccaagctaagatctggcaccaaaccacacacattggatgcaccgactgagtggcactgccccagcccctgagcaggtcccagccatcatctcctctgtggctttgctcatagaagttccttttttttttttaactctttgtcacctggaaggaaagccaaggggaactggattttactgagcactcttagacttgagagagacatttggaaagagggtctccaccctgaggaggacactgcgttgtgggcaggggcagtagaggagggggtggcctcggagaggagatgacaaggttggtggcaaggaggctccaggtgcctcagaaggtagcactgcgttgtgctgcctgggtggtagaagtggtgttttttgttttgtttttaagattatagcttgctcagtttgcactcatgcctacagctgggcttggtttttgcaggtgcagcgatactgtgagaagagcatgatcagcagaaag

SEQ ID NO: 740 - DNA, 30420 bp, Homo sapiens
ctgaggccacccgccagtttcaaattcagtggcgtttgccctgattcccggggcctggctttcagcgtagcaattctgccggcgaagaaggtgagcgcagtgctgtgtggcagcagaggtccttaggacgaggaacagcgggacgaggaagggcagactggtgaaatcgcaaactgggcgtctgttccggcaccggacccctgtttgcaaaggtgggtggcccgtccggagcggaaaaacattccggaagtggagggccgggccagcgtgattgacaagcgggaacccctgtgtggggacggggccggcctaggaaggttgtgcctgcggtggaacggcgcggtgcgcaggagtcggcattaacagcagccgcgtgtctgggtcttagatttggcctagctgtgttgagcttttcatggattatgttacgtagataagacactgcaacagtgagtgagcgcttgtaacccacctgtctcttacagaaactgagccccagcgatactaactttagcaaggatacagctgggatcctaaacttggcgatcagagcccagagccgataaagttagctgcgtgagtctagcttcccccggggcgggaatcgaggcggagcagggtacagtacggaggccagggatgagtgcagttgaccagattgttgacggaagtgtcataaaagtggacttaaatgttgataagcagctggttgggttccacacaggttgcgagctcaggatgcacgttggaggggacacagggccagagcaaggtgggaatgcgggtattatgggccaggccatcctccagctggtggagcaccgcagcactgcagtgtgtggccctggcttaacagcagtgcggaaaagcttttctcttggggctgtggtgctttccaggtgtgtgaagttaaaacattttagggccatacggtaggtagtacctgccacatagttgtcttggtcagccccggctgccgtgacaaaataccataaactgggtggcttagacacagaaatgtgttttctcacagtcccagaggcttgggatgtccaagatcaatgtggggaggacacaactgagcccacaacaatagtctgtactcggtaatgagtgataattggggactgaagaaaatgaacacgttaagaactaatatgttcctgaagtgctttcacaactctaacctcgttttatgagcgtgagctttgctgtcctggtgtgtgccttggcactgggaggtgatggttgtcctccacacagccaacctgaagagggctgaacaagtcgctgcaaatgtttttaatagggcttagtgaatccgttatactcagatttatctaaacctctatgatttagcctgtgctgcttctggaataatgagatccataattaccactgatggggaagtgaaataatacttaacgtttcttctgtattgtttagtgttgtcattctagagtttggtcaccaaatctgtcttttttatcccacttaccctggtgggaggaaaagtgaggagatagaaagtttcaggtggcttgggggtctggcagatgtggttcaaatcctgagttcaagcacttgctgagtgaccttgggcaagtcatataagtttactgagtctcagtttctttctctataaaatagagcttataaaaataccacacagggtttttgtggggttatctgaaaacggtttgaaaccattaaagaactggccatttaactaataggtattcaagtcatgggacctccgttacccagcctcggaagagaaacctttacttacagccccgatgtctggctggctcctcattcattcatcagatttttgttgaatgcctatgaggtgttgaagcacctagttctgagtcctggagccagagaagagcaagacagacaaggttcctctatttatggaatgtatattccagtgaggaagaataaataggttcagatggtgctaagagctatgaataaattaaatacagagtaatgtgatttttaaaaagtgacttagagcaagctagggggtgaggagtgggggtggtgtttgaccactgtccagcggccagacagccggagaggcttctctgaggaggtgagccaaagcctggatattgaggaggactccttctccaggccaaggggagcagcaagtgcaaggcccgagctgagtagatgaggctgggagccagaccagtcttaggctgaccagtgctctgtcttgagaggagctgctggtcagctttttgtcttgggattcagaacgaggagacataaagactttttacttggcagtgggagctgaagctgaaaggtccaggggctgatgaggccacgtgtaagcgaaagtttgggataagcagaaaccgagtgcgctgagggagtgagattgtggctgtatccggcgcctggctgagcaggagagtgaaccccgtgggtgtgtgtttgctggtgacgttcctggagctgtcttgaagtccgagctgccttgcagctctagtctgcttctgtttttggctttcccagatagtttcaattcttactctcagtttgtgaacctcccttcagtgaacctccctttacttatgctggatatctcttgcgactggatgagcttcactaaagcacagtcatttggatctggattcgaatccctggttttccactttttagctgtgagtttgagcaattatttaatttctgtaagcatcagtatccagtagctgtatccttatagtgttgtacagattaaatgagataataaaagcaaaagaccactgtagagtgtttaacacataggaggtactcaaaaatttgttaggtacctttcctcccctttccttcatgtgttaaagctttttcagtacatacccctctctcaggattgaattgtaagtcatattttttaattacccttcttgtaataattcctctacctctgtagtcatgtttttcttttttcattttttcttgtccccagaatgtctaacaaaacagccaaatatacctctgtaaagacagagggtaaaataatgctagttctgtgagttctctcttcttgtgcaaatccataaactgccaccaatctgtagtcattttaattgcccctaaaccgaagagcatcatggcaactacctttcccctcgtagagtgacactatcactagtcttactgaggccaaagttataaagatgggctctcgatctactaatattagtaaaatgggtttgggacttactaacatttgtgcttagaagagacagacctggcaaagagcttggagaagtgagttccaaagagagaggtgtgggaaccaggatggaagagtcaggcctccagatagcgtttacttctcctttcttccttgaatcactgtctcagagataattaggttcagaagaggaggaaaaaaaagatgacgtcaacatggagcagagtttttcttagaccttagcctagcaaggaaagagaaatgcctggtctcagtgctgggaagctgtttcagccagagccccgtggctgtgaagagagctctcctgtctggagccaaacagaaagctcataggtcttgaggccagaaaagttagtaggtggcggctctggtcggtgctggaaatggaggccaggatgaactaagaagcaaactaaagatacttgtaatataaggacgtgtaggctgggtgcggtggctcacgcctgtaatcccagcacttcgggaggccaaggcgggcggatcacgaggtcaggagatcgagaccatcctggctaacacggtgaaaccccgtctctaccaaaaaaaaaaaaaaaaaaaaattagccggccgtggtggcgggcgcctgtagtcccagctactcgggaggctgaggcaggagaatggtgtgaacccgggaggcgagcttgcagtgagccgagatcgcgccactgcactccagcctgggtgacagagtgagactctgtctgggaaaaaaaaaaaaaaaaaaaaaagataaggacgtgtatgttaacttgcgctatccaaacaagctgtgcttatggtcctctgcctgtgcgtcatgattttccaggacttcacaacgggataaagtgaagtagcttcggcttgtgaatgtgcattgcagagacgtgggagaagaaagctgcaaaagtcattatgagcaacacccttgatcttaggggtgctggtctttgagaagagagctctaagccttttgtagaggcattagaaaggtatcggcgccacggtgaaatgcaggggagattgggtttaggggctttcctggtctgcattctgctacagccgttaaatgccgctagatggagtgcgtgattctggtatggcctcatgtggacctgcgaaggatggagagaacatggtctctgcttcccagaaaaaaaggagaaatttggtaacaagtgtggagactgctcttaaataatgctccagatttcaagccacttcttcctggaccatgagagagctccctaatgttgtatttatttttcctaggtccatggctaatgaaacacagaaggttggtgccatccattttccttttcccttcacaccctattccatccaggaagacttcatggcagagctgtaccgggttttggaggctggcaagattgggatatttgagagtccaactggcactgtgagtatgaacagtgagagatactgaaaaggacaacttaacggcagctgtgctagcttttcctgtttgcccatccagagattttcatagtttgaagttgggcagagtagtctctctcagtttatctttctgagtaatagtcgcttcctctattaaaatcttttttttttttttttttttttttttgagacggagtctcgctgtgtcgcccaggccggagtgcagtgggacgatctcggctcactgcaagctccgcctcccgggttcacgtcattctcctgcctcagcctcctgagttgctgggactacgggtgcccgccgccacgcccggctaattttttgtagttttaatagagacagggtttcaccatgttagccaggatgatctcagtctcctgacctcgtgatccgcccacttcggcctcccaaagtgctaggattacaggcatgagccaccgtgcctaaagtcttaaacatagctctgtggtctgagaaaaattaggctgaagtcattggtgcctacctattacggtagatgagatggctttcttaccaactcttttccctccggttccccatccttcaaatataattctaagttttagtctctgctgagtgaaccagtgcgttatgattatgttttgaacataattttgtcttgaacaatatgtcttaatattctgttttctctagttaataattgcccttttaaagttagtttagtttttaatatacctatgccagttcctcccacatcatccagtggcctctcaatatgattttccatacagataactcctgtcttagtcggccaggactgccatagtaaaataccatagactgggtgacttaacaggaatttattttctcaccattctggaggctggaaagttgaagatccagattctggcagggttctggttctggggagggggtctcttcctggcttgcagatggctgcgttcttactgtggagcaagaaaagaggaggaggagaaaaacaaatctttggtgtctctttctcttttatgaggacaagggctgctcccttatggctgctcctttatgacctcctttacccttgaaggccagatctgtagtacagtcacatggcggggttaggatttcaacatatgtttgtttgttaagatgggcagtctcactatgtggcccaggctggtctcgaactcaagcgatcttcccctctcagcctcccaagtacctggtggctggcaagatccaagattactggtgcacaccaccatacacagcttcttttgtttggtttttgttctttaaaaacttttttttaacatgcattttggtggggatacaattcagtccacagcagtgaccaattccatttttaccttggagccctcctggaatcctccatcctttccctgtcatttgaattagttgctcctcagactgacttgacagatttcagcatgagtgttagtggggacagacggccgcacccacaccacatcagggtatatgtccgtttggaggctttcctcaaacgtctggcagccctggactgcctgtgtatgctgaagaagagggcacagaaaggctgagtctgcagggcaggctggctgtggctgccaggctgggctcctttgttgggggcctccagttgccagcacatctgtgggattttccctagagtcttcggtctctccagagcaggtgcctctgagctctggcccagcaggtacagacgctgaagcccaatagccggtcttccgggaggtggtctggggaaggggatccaggtggagagtccccctcagtgcctgctttcagcctgaccctcctctccctccctcttgcctcctcaatctgccagttgcctccagggctctcctagctcagcttccacttagagcccacttcctgtgttctgcaaggagcaggagcagggattgcaacctgggaatctaattgttcttaaacagaatttcaacccgtccctttgttttcagtggcctgctgtgttcctaccacttcctgagtctttctgagaatgagtgggggagatctctggggacacttgggcttgagtgtctctgccgaatcacttccatgtctctgccttctttccctctctcctaaaacatattactccttccactttctttgtttttgtgggtgtaagcctccatattactttggttaattttagtgtgctttggaacacagatgagtgcatgttcattctgccttgtttaattttagagacagggtgtcgctctgttgcccagggccgagtgcagtgttaagatcatggttcactgcagcctcgaccttctggcatcaagtgatcttcccacgtcagcctcctgagcagctgggactacaggtgtgcgccatcacacctaactaattttttaatttgtagaaatgagatctcactatgctgctcaggccggtggtcttaaacccctaggctcaagcaatcctccctccttggcctcccatagtgctgagatgacaggcgtgagccactgtacctgaccccttttaccttgtttagcctgacaacccatcttctccctctcaggtctttccatctcagtcttctgcactccaggcttctgcatcttcctcctatgctcagcctttaattgtcgatgtttctggttctatagcttcatcttcttgtgtgcactctctgtgaatgtaccctgtggctttattacctttgacattcttctgtcttctaaatcatctcctgaatagagtgttttctcctgtcctgggtgtcccccagcccataggagcagccatgctgtgggacaccctgagtggggtctgtgttacctgttgtgcctaccatgcccttccccgccttggatgcacaggtgccccaccttagctgcccgagatgctgtttatccttgatagtcaccttttaagccttctacaggtctatcaagttgagtcaccattaccacttggtgtgtgctgtgccttgtgtaacactgcagttccgggagtcctccaacctggaatgcatgctttgcggggatctatgatgccctcgaattgtatgttacatgtgaacctgtgagcattttctaggggctctgcacctttgtgttctcagctctgagccccatgcttgctgcaaccagcaggtgttcagagtgaatgaatttgcttatcttggcataaatcatgtaactgttgatgataccccaggaaggtgagcctttggttataaatccttttaacattttccagtctaaaagttttgtggtcttattacaggatgtagaaaacagtgggcctcagttattcttttgctgttgtgccggagtataccacggttgtttttgaaagataactttgaccatacccttaggaacttcctcagctcactttcaaatggagggcactggctttctaaccattgtgtctcccagcccagtgacagctgaagctgtctgcttccgatatcacaggcagcacagaagagccgccctccaggtgctgctgggaaatgctgcctggaaccctttgccatttactttctatcaaaagctgagggaaatggtacatatggggctttcctaaaaatatgggatccatccatttgtcagcaatgtcattctatcctatcccagggcctttcaagattttggtgaaaactaatagatcccatattccagaataatgctattaataattttattattattacttaatgatagcaaaaagttagctaactccaaccgctcacttgttatttgccaggtaatcctctgatccagaggatttggccttttgtgtgtgttaatgtcctgcttgcaccagctgtatgaggaaggtgccactgttgtcatttccatttctgcactcgtggaaacaagcgtagtgaggccagcctgagccacagagctgcaggtaggggaggcagctggaaccctggcgcctggctgtggagtttgaggctctgactcctgcgccgcgctgctgccccaaccctagtcatacgaggtgtttcaccccgccctggatactctgagatcccctctgggttcagcaggctcagagagctgactgcctggagcagaaggcatggggtcctccagagactcccctgagctgagttcccctgtggacaccagggccgcctccttgtggcgctccctgaagggtcctctctggaagaactgtattggttccctggggctgctagaggaaagcttcacaaactggggcttaaacaacagaaactgacatcccacagcgctggaggctggagtccgagatcaaggtgtcagcatgcttggtcccttctgagggtcgcgagggaaagatctcttcaggcccctttccttggcttataggggcgtgttctccttgggtatcatgacatcgcctgccttctgtgcatgtctgcatccacgtgtcccctttccaataaggatattagccctttaggctgggtcccgtcctagtagtctcatcttaactaattacatttgtgacagtcctatttccagataaggccacattctgagatgctgggggttaggatttcaacacaggaatttggaggaatacaattcaatcaggcttatggacaattctggtcttaagtcaagagtagtgttctccagtctgtatgtggaggcgcacacctatggtcccagccacttgggaggctgaggccagagaattgtgtgagcccaggaggagttccataccagcctgggcaacatagcaagacctcctctcaaaaacagacaaaaaaagtggtgttccagagtgattagtttgctttaaaaaaaaaaaaaaacaaaaaaacaaaaaaaaaaaaacacaaaccgtaaacactggcactcgtgactgatcatcctgtatccacgcacgagctgcacgaaggccgcgcggtcactgtggctccccgttggcgagtacctgggatttcttgctcagcagtttggggccttaattcttttaggggactttttgtctaatgtctccccttcttctaattatgtgcgatatttacatagaatctgataaactgcttcaaatttgttttcagaacagtgagctggataattaaagaagctttttcctgcttcttgggcccagtttccatttcttccttttttctgtttttcctggctattctagtgctagtttccttcctttcctttcctaggctggccttagagcatcctctcctatgtacagccagaccttctttcaagcttttattaaaatggggaaaggtcatttgggaggctttgttgttttcctgtttctaaagatcatttttcttcctgcaggggaagtccttaagtcttatttgtggggccctctcctggctccgtgactttgaacagaagaagcgtgaagaagaggcacgactccttgaaactggaactggccccttacatgatgagaaagatgaatccctgtgtctgtcttcctcctgcgaaggggctgcaggcaccccgaggcctgctggagaaccggcctgggttactcagtttgtgcagaagaaagaagagagggacctggtggaccgactgaaggtgagacctggggtatccggaagtgggagtgctggaggaaacagggcttcagcgattgttgtggggcgattccgagactcaggcagtgcatgctcccctgccgttgctgtgcctctcagctcttccctcagctccttgggtcgatggtgctgccgctgtgctgtctcttttgagctggaggtcagcagggccttctccacacaaggaactgttggtgcccatttattactcacctgggaaaggacctgatcgttgccattggcagcatggttcaatggctgcaaatggatctgatggagagcgtgtggctttgggaggagcgtgccgccttccacagtgagcagcgaggctgggacctgcagggatgaggtcccgggaggggatgcggcagcccttgagtgctggtcggggaaggagagctgcccgcagtgaggaggcgccgggctgagtggcccagactccttaggagaggcctggttttgggcttcctggtgattttccttcatgtctgcctcctgtaggtggagcaggccaggaggaagcagcgagaagaacgcctgcagcagctgcagcacagggtgcagctcaagtatgcagccaagcgcctggtgagcctcatttcttggggggcaggattatgtccaggcagggtcgccctgcttggaggctcatgggtgcgtggccagggtcttggtctcccctccatgaccctcactggctatgtgctcccgtacagaagctgggctgtgagtggttgaggcgtggatcctaggagtcgacctctctccagccaggcagccaggcctatgtgaatgggcgtggtgtgctttgtctctggcacgtggggaggtgggtactggtgctgagacttcttcctccctccccacctccactgcccctgtccagaggcaggaagaagaagaaacagagaatctcctccgcctcagcagggagatgctagagacaggcccggaggccgagcggctggagcagctggagtctggggaggaggagctggtcctcgccgaatacgagagtgatgaggagaaaaaggtggcgagcgggtgagacagaggcggtagcactaccctgccccaggccaggggacacccttgaagacagctctttccctcatgccacagatgccatgaagcacctggcaagaggcatggtggcctctgccctctgctctaagccgggtccctcctagggtccatgagtgccagtggcagtgaggacagtcaccggcctggcctgtgtcctctcagctgtcctcacagcagctcaggcagggcaggaacatttgtgtctgcaccttatacacaaggaggctgcagccccacaaggagagactccttggctgaggccacaagcctcggcagtggagagctgggctagaactcagccggcctggctctacatctcaggctctgaggcagctgactgcactgggtaacctttgaggtgccaaccgtcaaggcgtccttagcctgagctttccttctcccataaagcctctgttggtccagactcaaggtttccacttgatgagccatgagctgctgggtgacttagccctgagcaggccacccaggccatttcgggcccacaggatccctggtgacagccccgtttccattcacactggaacctcaccaccatccctgagtgtctgctctgagtatggcactgtccagatgctgtggacgtagaagggaagaagacatggaggggacagttaatagacatgaaaacaaatagcacctatgtgaagtcagcatgtttgcctacaaggaaaacaaaatggtgatgtggatggggtggggggctgcacctgatgatgagtcccgtgtgtcctgtgacatcctggccaccacatctgtgggagggtaactgcaagaccagagaccctccgtggatattcctgaaggttcatccccggccttcacggtctgtctgcagggcgccttctgacgccacctccagccgccatccaccagacgccagcttccccgctgccctgaacttcctccagcgcaccaggccttcctctgtcctgtctgaggatttgctcatgcaacgtgctgtggccaaacaccctgccctcctcccttggcagatgtcttcctctcctttaaggcctggctcaggtgtcgtcttggtggcttcgggtgtcagctgctctgttttgctcacgcacctgcttgtgcttctgttgttgcctcctctccctggctgggctcgagctgcttcagggcaggaaccacgtctttacagtttgatgttcccagagctgacccagtgtttggcataggggtgtgctcaataaaatcgagttgacatgaatgagcagatgctgcctcgttgcagtctggtagtgtaattccaggctgcccatgtggacttcgacttctgcccctgcccagggcagagaccaccgtgttgctttatgcctcgctggtgagagggggtcataaacagtttgtgctccatgaaccgttcctgcccacctccaaggtcgtgtttctgctccctctcttctcccttagagcccatggggacaaggcagagaacttgagtggagatgaaggtggtgaatattagaggaacaaagtgctccttcaggtctgggcaagagccgtggatcctgtaggtcagcttccggggcttcccatgccctcacgtttcaggagataacgtgagcctcagaggacctgagttctgaatagaaaatttttgctcttcatttcttcacacacccagcctctcagtgagctcctgctggctttgtccagcatgcgacataagattgaatccaagccttttaagatagagccgcctgctctttagtgaccatgaagccaagcctgtaataattactcttctgatagcccaagacaattgtattctgctttgttagaaaggaatttcgaggtgaacaaaaatgttttctttttatgtgatgttgccataggtggcgtgtgcctgtcagatggttttgtgttttctgaggagcatagactagtagagctagctcagcttcaggccatgggatgcagggctggcttccctgccaacgcctggcgctgatggattcttcccgcattgctggaaagggcagactgaggcgctgacaaaagaagagttgcagctggtcataagtgacagcatcctctgttcactcgattggtcagttgtagcttcatccaggagatggtcatggggttcctgctgcataccaagctctaggtgaggccacggggactcagcagaaacaaggccgacctgggtcctcccttgtggacatgacagtctggggagatagaccgagaggaagcaattttgaatgagatgggtgtgaaggggccatgaatctgtgtcagagcagccagacctaccagggaaggtcaaagaaggcttcctggaggaggtgatgtttctgctgctatctcagagttgactgggagctggtgaggggagacaacattccaggcacagaacatccgaaggcccgagatgatgaagagcaaatatcccccctggggcctcagaggggtccagcttgctggagggagggcagagaggagagcagcctgccatgagtcccgaggcttccaactcaagacttgggtttggggtgctgagctcatgtctcctttttacatttccctacccacagacctgagcggccacgggaggttggggttggcatttgcctgggggagtttctgagcaagcagcacctgctaccttggtggaacccattgctgggaatggccagggctcagcaccagcgctcagcagatgctcagtgcgttttgctgagtttgctgagggaagactgttttctattctctctcacacacacagagtggatgaggatgaggatgacctggaggaagaacacataactaaggtaacacgagtgtcctcagctggtgctgtgctgggggctgtgggctgggctgtgtacccttggggaagaggctggagtcactcggctacttctcaccctcctctccacaaaggaggagcttccagcacttggactctgttgcttcttgcacgcaaccctggtcctgagttgctcccttggtcagctgcagtggaccctggagtcctctcctggggtcagggcctggggagtcctctcctggggagacctttcctgggagcagggccatgcttgccaccccagggcatagaggaacagctgttctgggctgaagtctgggtgttttctgtccctgctgggtggtgctggatatgactcgtggaaggagctgcctgtggggcattcccttgaacttctggagctgtgggtgacttgggaatccctgggtccctcgatagatgcctgacatgggacattgctgtcctgcctcggctttgtgcattgggagccactccctttccctcagcctctcaggccctggcgtgccttgatgttagagaatgctgtgggatgttttggttccctctttgaagtgcctttctttctctctgctagatttatcactgtagtcggacacactcccagctggcccagtttgtgcatgaggtgaagaagagcccctttggcaaggatgttcggctggtctccctcggctcccggcaggtaaacagtagccagtatttccaccaggggccatcctgctcctttccccacaactttgtcctgctcgtccaggcctgggagacgctgggtctgtgacaggctgaaccgtgtgaggagcagccccctccctggcctggccggcccatcactggaaggcaaaggagaggtggcgggggcaggtccacgtgtgttggtaggatgtcatttagctggcaccatctctttgcctctttctttctcctttgttgcagaacctttgtgtaaatgaagacgtgagaagcctaggttctgtgcagcttatcaacgaccgctgcgtggacatgcagagaagcaggcacggtagccaccgggaccatggtgtagccgcaggtggtctggagagagtgaggcaggggtggcagtgactgaagaccattcagtgtctttcatagaaagaatggcagaggagaccccagttccttcctgagtcccctctccttgggaaaaagtgttcctactctctgggtgagcgtctggtccgaatcgttggcttggagatgattttacgggctctttctggagaacaaaagtaaaaccttagtgttccgatgagacacagtaggcagtacttgggagggtcttatagaccccaccctgtggaagtgggtctcaacattacacaaccccctctcgggcccgtggacagttgctgtcttctctgttttctctctttgtgcctgtgccaccctcagagaagaagaaaggagctgaggaggagaagccaaagaggaggaggcaggagaagcaggcagcctgccccttctacaaccacgagcagatgggccttctccgggatgaggccctggcagaggtgaaggacatggagcagctgctggcccttgggaaggaggcccgggcctgtccctattacaggagccgccttgccatccctgcagccaaggtgagggccctgcagggccagaaagccgctcttggctctcactgtggtctaggccatgaggggcgtcctcatcacactgtagtttgggggatgccccccaccgtggtcaggttgatggcaccttaacccattctctcctgatgcgtgagttggaggaggcgcgtgggatcccttggggtctccaggcagcagggccagttggcattactggggatggtatttaggagccaggaaagccggtgcattcctagtgaaaccacagggagaggggggatgccaggagctgagaagagtgtgctgcatacatctatttacaaatggctttccaagtgatgctcccaacttccatgcctatgatgtgatggaggatgtcagtgatagaaccattcagttttccagtttttcctttttgtaatatcagtactcttaactggaaagctttccctaacttacacctacctgcagcacgtgagaatactgtcttctctgccacaacttctcttgatttttaaacagaaggaagaactgctaatgtagcagatgaaaagtagtatctcactgttacttggtgggtgcagtttcactatttccttgctacttctttaacttgagtgactttggaaacgggatatcactagtggaaaattctgtataatccagaaaaaaatgtaaggttttaaaagattcagggaactaagtaaccgtttgcacagcagctaaatgctcaccagcatacctgctgagctgtgtgggcgctggcagagaaactgaggaaagctgccaggccccatggtttcccaggccttccctccggtctgtttgcctttagagcaagattagtgctataggcatttatacacaaataccataatatggcccaaaatctttacgatttttgaatttgtaaagtactttgaccatattttgcttttatgttaatagtattccagtgaaattccgtgcatggggacactggagcccagaaaagttaagtgactcatattttctcaccaagcgtgggtgatggagccattcagttttccgatattttattttttatatgagtattcctttaactggaaactttcctaacaacaaacacctaaagacctgcagagttgcttttatttttgttaccccagctccacgccttaaccctcactttgaaataggatgtatcaaccctattttgcagatgaggaaagcaagggtcagagaggttagacaactcttccagagtcacacagctgggaagtagcagctccaggagcagaagctggggccgcttcctggtgcaccgatggtcttcaggtgttttgtggaaactcgggggcctccggggcgaccttgaggacatggacaaggctaagcaggggttcccttcacccagccctgcccttggtttactcaggagtcagaccagccctagtttcctgtgtttcatgtattggcttttcatgtgaaactcgaggagagcttgtccgttgtcagaagctgttttttgaacgtctctacacagtccaggcaggaaatagaagcactcacatcaggagctcagtgtcaggcaggcaagcctcctgcaggggagccccgccctgctcaggtggcctcatctcccctcccagctggtggtgctgccctatcagatgctgctgcatgcggccactcggcaggccgccggcatccggctgcaggaccaggtggtgatcatcgacgaggcgcacaacctgatcgacaccatcacgggcatgcacagcgtggaggtcagcggctcccaggtgcgtgggcctcccctccccaggccagggcctgccgtgaggtaaagggacttggatggttcctccagacacccgggccaagaattcctccggaggtggggcttgctacagggtgcacgagtcaaggcggtgacctcatcggaggctgaccatggctttccagtgcatcccagaactctggggaccccgctatgacagagtgcctcatttccctgcacctcacctgcccccatgctcctgagtccctccagccctggatgccagcagccagttctgcaagccagggagatggcatgtgtgaggcagaagtcccctcaggattggattttgtcattactgaagttgtctggaggggactgaattgaggaatgctcaagatcagtgcaggctcctcctgctgccctatcatgcgccatgcatggcaccaggtgtctctggtcttcacgctgactctgccatgggggtggtgttcctgttttacattggaaacttggagattcaaagatggtcaagctctgtcctgaggtcatgcagctcatgagtgtggagctggggtgtgcccactggtttctgactgtgaaacccccacgacatcccaccagctctactgacctgtgcctgggctgaattgaggctgggatgtgatggtgaccttgaaccatcactctttgtagactccaggtcttttcccaacccggtggaaactagcaggcagattccatacttgaggaattcagcctcttgctttttctctgacccacagtggacactggaggaaaccttcccttccttcccttttctcttagctcccaccagcctaagggctgtggaaaccagtaccttttgtctgcacccagccccctctcctccctttggtggcttcctgtgtgtccagggctagcatcttctaggtgaatctaagatgtcagtaccttagccctcggctgcttgctcagagcctggtttgtgttctttccccagctctgccaggcccattcccagctgctgcagtacatggagcgatacgggtgagatgtgactctctgaggtagtgggacagtcccttggtggccccctgcatgggcctctgagaggcagcactttggttcccacctctggcccgtgctgtggcggggtggagctgcatgccattcatgtcctaggcacatgatggtgtgtgctgcacacagacctggaaggctggggactgaccgctggctctgaggcctggggccgtggccagcctgctctctgggaaaggatttgtagcttgtgacccagtttgagaggcaccgggcagcaaggcttccactggggtgggcggggcgagtcgccatcagggcaccaccacttaatgtccgttggcttcttctcaggaagcgtttgaaggccaagaacctgatgtacctgaagcagatcctgtatttgctggagaaattcgtggctgtgctagggggtgagagcctcgccccccggctaacccccggcctgcaaaacccaccgggctgctttttccttggatgcccatcaggacgcctcagttctctgtgtttttaagaagggtcggccgggtgtggtggctcacacctgtaatcccagcccttgggaggccgaggcaggtggttcacctgaggtcaggagttttgagaccagcctggtcaacatgatgaaatcccatctctactaaaaatacaaaaaaattagctgggagtgttgccgtggcctgtagtcccagctgctccagaagctgagacaagagaattgcttgctcaaacccgggaggcggaggttgcagtgagccgagattgtgccactgcagtccagtctgggcgacagagtgagagtcagtctcaaaaaaaaaaaaaagaaccaaaaaaaaagaagggtcttggtcattgatttagaaaattcttgttctttgtagcttagttgagttgtctgacttgagctttttttagacccatgggttctttgcccatgttctgaggactttttatttcaggcgctgctctggggggatattaaggatacagcatcacatggacacacggtgtttccgtgataggcatagttctgtgggttgttcgaagcacttgcatatgcggttttgtgtgccctgtgagaacgcagtgctggtatttgaatccttgttgatagacgcataaactagagctcggagcaagggctgctcccagcacgggagcctgggatcttctgactccagctcccacgcctctttgcgtgaccctgtcacgtccccttcttttatgatggggcacccccttgctggaaggtgtctgtggaagtggaagctgcagaaagcctgtgggagctcctggcgggagctggtctcgtgttgctgctctgagccgccagctctgctttgcctcaggctcaccagtggcctgggcagctcctctgtgctccggtgccctgcataccttggtctggctgctgtgtcccggcctcctggagaaggggtgaaaaacatgaacttacagggctttgggttccacgtgcaagcacgtgagtcagacgtgggaggctcctggacccacctgccctctaagtgggtccgttgcatgctataaacagtgaaaagcaaaacaaagccgttcaaatacagatgctcttcttacttgatgtgcagtgtggagggagagaagatagggaagggttggggggcctgagaaccaccattgtgacctatttccattctcttttttagggaacattaagcaaaatcccaatacacagagtctgtcacagacaggtaagagagttgccctcagagggcccagagctgatctgagccacttccgagcttaaccctgggactgaaacctgaggcttagggtgaagctcccaaggcccttcatgtgtttgttctcagggacggagctgaagaccatcaacgactttctcttccagagccagatcgacaacatcaacctgttcaaggtagaggtttccaccttgccatgttccacatccagtttccttcctgtcaccacctgtgggtagagtactatgttaagactatagaaggaagaaaaagcaaaacagacgtgtaattacttaacccttaacgcaacacgcctgtgagacaaaagtcatcatcttttagagtgaaggccacagggatgagggatgggtgagaaagggacctttcttggtgccccatagaacagatagagactccaggtccttgctgtctcaccccatcttctggcacagtctccctcaggcttatggacaggaataggacgttgatttgttctgtgcaacccctgtcacgtcttcgcacttgggccttgggtgtggttgcagcctcagacctctgctcgctccaggtctgtgtacccagcgctccccagatgaaacacggccactgccgcctgaacccccagctcgtaactcaaatcagcaacagtgactgcccctgggtacagggttctgcctctgttctaggcggcatgccacgtgctgtgctctgagctaggatatccttttgccccggcaaggaaagcaaacaggcccatggaggtgacttcaggagggtggcgagcacaggcttcccacaagtgagccaatagcaagtggcagagacagcgtccaaacctggctgcactgacttggggccccacattcttcccatcgtgcctgccttttttttcttaaaaccagcttttcccctgaattacacatttgggtcactgtcactgccaccatccctgccagacaggctggatccacgtcatccttgatgcctttctccccttgtctcccacatgcctgtgacagccgccaggcctgacagcctcagacagtcctgccgtccccgcgcttctcccacagctgggacatgggtgcaggcactccttctctcgccttccctttgccctccttgctttccttctcccttcttcccatgggtctcgggtctcatcacccaccattgagggaatcctcatcgaaggacgtcgctctttttagaaaccggtttaaagcctccaaactcctcatctctgcatcccaagctaagatgtggcaccaaaccacacacattggatgcaccgactgagtggcactgccccagcccctgagcaggtcccagccatcatctcctctgtggctttgctcatagaagttcctttgttttaactctctgtcacctggaaggaaagccaaggggacctagattttactgggcactcttagacttgggagagacatttggaaagagggtctcccccctgaggaggacactgcgttgtgggcaggggcagtagaggagggggtggcctcggagaggggatgacaaggttggtggcaaggaggctccaggtgcctcagaaggtagcactgcgttgtgctgcctgggtggtagaagtggtgttttttgttttgtgtttaagattacagcttgctcagtttgcacacatgcctacagctgggcttggtttttgcaggtgcagcgatactgtgagaagagcatgatcagcagaaaggtaactgctcccatcttgtggtcctgaacaagacccagctgtgccccaaccccctgccgttgccatgctttcctcccctgccctcagggaactccagagtccccttcgtctccaccctccttggtgcagtgggccttgctggggtggtgggatgtgcgcttcaggtgtcttgagcctggcagagcctccgatccacccagcctctctctcatggctgttcctcgttcctctccactgctctctctcatcccacccagctctttggcttcactgaacggtacggagcagtgttctcatcccgggagcagcccaaactggctgggtttcagcaattcctgcagagcctgcagcccaggacgactgaaggtgaggcaggagggtgagcaggcagagccggctgcaggcatgggcaaggacttctgttcctcatgtgtggacctgactagagggaggcctcctccccattctgctctgtgcagctcttgcagcccctgcagacgagagtcaggccagcgtcccgcaaccagcttccccactaatgcacatcgaaggcttcctggcagctctcactacggccaaccaggacggcagggtcatcctgagccgccaaggtaatcaggtggttcttggccaggttcagttcccaggaaggagccaagctgagcccgggagccgcagcatgaaaggattctttccttccatcctgggaacttcctgggttaggaggaagcagtgcagtgggcactggcctgctgtgacctgggcaagcagtggaggtggacgggaggagatcgaggggctgggatggaggtcctctagggcaggggtcctagggaaacttgtattgtggggtaggtgggctttggtttgggtcatgattttgtcatctatgagccttgtgatttggactattttctttctcaacttcagtttcctcatatgaaaatggagaggataggccgggcgcggtggctcacgcctgtaatcccagcactttgggaggctgaggggggcggatcgtgaggtcaggagatcgagaaccatcctggctaacacagtgaaaccccgtctctactaaaaatacaaaaaattagcagggtgtggtggtgggtgcctgtagtcccagctactcgggaggctgaggcaggaaaattgcttgaacccaggaggcggaggttgcagggagccgagattgagccactgcactccagcctgggcaacagatcgagactcctctcaaaaaaaaaaaaaagagagagatggagaggacagtatggtccacctctgtgggctggttgtcctagagattaaatggtgtttaatttaaagagaaagcactagcacttgtgcctcagacctggactcacctgggggaccccctttgctgggacgatagaagtgtctgttgggcttgcactcacctcccaccgatctgtttttccaggcagcctcagtgagagcaccctgaagtttttgctcctgaatccagctgtgcactttgcccaagtggtgaaggaatgccgggcagtggtcattgcgggggggaccatgcagccggtaaggacacctttcccagcccctcgtgccccaggtgttgggatgagatggggacttgggagagatgcattatcagtcctgttctctcctggggccccaagccagaaagggtcagctcgagcaggcccagtggtgtccactgggtgacactgctattctctcactgctgtgccttttaggctgcaggagcagtgcagactcctctgctgctccattctgtagccccaggatcacacttctcccagagaaagctgttctgtggtttcaaactcaaggaaaaaaatcatgattccacttttaaaaggttcattttgatgtatatgaatataatagtctttgtaggcataatttttacttatgtgcatagctattttaaaaacaaaagtgcggctccctccatgtgctgtcactggaacttgctcttttcactcagcagccagagggtcataaaccctgtctccttgtcagcaagcatgcacgtatttcagtatcccagctgtgctggattccagttacccagatatacagcatttcatgtacctccttctcttttgttaggtgtgcaagctatttgtagttttctgttttgagcatgactgtgatgaatataaccgcatttccgcacagtggtgactcctacctagcaaagggcctcctggacaaaaagctgctgggaatcctgaagcagtgcttcccagccccagctgccttagcttttgatttttatatttttgtatggatagattcatagttttattcattcggcatattaaaagttgtttacagtcattattgtttctgacgttcacatggtgagagccccttcctgctagctcaggtcctccccgtggcccggtcagtctcgcctccagcacagcagaatgtcatgggatcaccatgggtgtccttgccgcacactggattgattcatttctccaagctgctctggtttcttgtaatggggaatgacatttagaagtcaagctgtgggtgctagggtgtttgtcgtgctcctggggcattttggtagacagatctaggaaatgttttcagagtgaatccatactggtatttctttctttctttctttttttttttttttttgagacacagtctcgctctgtctcccaggctggagcgcagtgacccgatcacggctctctgcaacctctgcctccggggttcaagcgattctcatgcctcaacctcctgagtagctgtgattacaggcatgtgccaccacacccagctaatttttgtattttagtagagatagggttttaccatgttggccaggctggtcttgaattcagttgatccgccagccttggcatcccaaagagctgggattacaggcatgagccaccacgcctggcccatattggtgtttctaagtaaaaatcaaaggatttgtttacttgaccttttattgtacctctttttctcttaagcctgaacatgtgtgctacattaacatacttatctgctctatcctataatatacttaaaagttttgaaatcatagtaccaatattacttctaacaatagatctgattgaaattgcctttcctctttgcccttagagtgtaacccactaaggatgcctggtcactaggctctaaagtcacgtggaaccaggcttctctccgtgtgcttctgttgtcagtttcatagatagctaggctgtttttgtttcattttcttttcaattttagaatttgctttcttcttttctgacttgtagtttttaaatatgtaaatatttgtatggctcaaaagtcaaagcaatataaaaagatctattcaggaaagcctcactctcatccctttccagcccattccccacccccatagggaatccgttttactagcttatcctttcagtctttctttttcccctaaataagcaaaaacgtgccttcttttttccctttcctgttttatttacacggaaggcatcttagtcagttgtctggccatcgctcctctagtgggctgcgtggttctctgttggacagatgtaggaagcttatccaaccagtaccctctggataggcaggcgcatgattacagggaaaggtccgggggcacatgctgtttggtatttgtgggctgtatcttctcactggactcctaaatatgggattcctgggttaaaaagtataaatatgtttaatttgttaactactgtgaaatttcatgagaattgtaccattctgtatcccaccagtactgtctaggaatgcctgtttctccagagtggttacttttggatttttgccagtctagcaggtgaaagcctggagattgttattcagtagtttgggctggggcctggccacgtgtatttttgaaaattttcgctggtgattttgctgcatggccagggttgataatgactgtgccagatttgctggatttcctttgctattcctgcacatagtttaaacgagactgccagcactgggtatcagtcaccatttttctttttgttagtttgccgtcagccttttctttgacctcttctttcagtttgtgtgtacttgctgtctcttaggccagacttctcgcttcctttctgctgggcctctgaggggtcatggggccatgacgccgtggccttggtctacaggtgtctgacttccggcagcagctgctggcctgtgctggggtggaagctgagcgcgtggtggagttttcctgtggtgagaagctgtgcccagggtggggcaggctagaggtcaggttctggcccccgttttctgtgggtaatacctcataccgtgaccaggcacagaggcggaggagaccccgggatgggagcctcacccttcgtgcgctcgcccaggctctcctgctttgctccctgctgcctgctgcccagtgtgactggcgatggtgggtgggtgagcgctgtcagtcgctgttcctgtgctggatgatggggcaggtaaatgccctctctgcagtgtcttacagcacacctgcatctccagttttcggcccctccctgatcttaccaggtcacgtgatccctccagacaacatctgccccttgtcatctgcagcgggatctccaaccagccgctggaattcaccttccagaaaagagacctgcctcagatggtcagtcccagccagctcgctgcaccacagcctggcctcaggcagcaaagggttttctggggcagggacgctctggcccaccctgagtgttttcaggtgttggggaaattgcacagggacacccacttagagccacacagaatgagcggcgtcgatctagatgcttatggaggaaggtctgagcttccccgcctctcacaccttaggctgcgaaatatgtattcataaaacctccaggcatcttctgaggacgcctcacgcaggagaaagctgctagttccctttggctctcttgccctttggttatatctgcccctgctgggggcagggatgtggggcttgggggcatctcctgtggtgtgcctggggtgtgcagcccctgattgtcattgtggtgcccatcaggaccctggacagaagaagggaggactcagtgccagggcaatagggaggccccccagggacgctagtgctgtgacatgtgtcagaaaggcgcagtcagcagcagcggctgggtgtgtttggtgggaggtggcacctaccaccccgtggttcccacccaggggagccaagtcctcttccttggctgtagtcctgccaagggtctctcctcagttttgagtctcaaggtgaagacgcggtttgtgggtggctgaggggttgctccatgggggctccctccctcccttccttccttagatggacgaggtgggtcgcatcctctgtaacctgtgcggtgtggtttctggaggggtggtctgtttcttctcctcctacgagtacctgcgccaggtccatgcccactgggagaagggtggcctgctgggccgtctggctgccaggaagaaggtgagtggcctgtcggcagccttgccacttgtgaggacagtgccactgagtcctcctgggagctcttgtgctcatcgggtcgggacaggcttctggctcctcatccccactgctcccagtccctgactacagaggatttccccaaagtccctggctgtgaggttctccagtccgctggccagaaaacacaaggccacgagcagacccgagacctggcaccctaaacctgtctctgggaaatgtcctctgtctttctcagatattccaggaacctaagagcgcacaccaggtggagcaggtgctgctggcgtattccaggtgcatccaggtgcgggcgtcatgctgagcttgggtctgagaccatgtgggggtggcagctggaaacgtgggtgtcatccaagttttggctcagcaactcagcgtctgggtttctcctacaggcctgtggccaggagagaggccaggtgacagaggccctgctcctctctgtggttggaggaaagatgagtgaagggatcaacttctctgacaacctaggccggtaagtagtggttctgctcatctcctgggtcgtgatacatggccggccctcactcccagcagctgggcccctgcctgctgtctgctgccattagagcccacagctgggctgcgactgctcagaccagccagctggagggaggggctcagcagctctgggtttggccctgagagagtagttggattttaggctggccattgctgtatcaggacccaatcaattggcctagacgggatctctcagccttacaagccctctccaggtggtaggtacagagtggagagaggctgagttttgatcacagtcggagagggctgacggaaggggtagaacggagcagctggtgacatgggtgatgacccgggagttcctgacgtccacccactgggctcttgtctcccccccacgtgtgtggtgatggtgggcatgcccttccccaacatcaggtctgcagagctgcaggagaagatggcctacttggatcaaaccctcgtgagtgaccccagtgtcacagagggtgacagagtaggcagtgggtgggagtggcatcacccccagggctgatacagccaggccttccccactgcgctggtgtctcctgccccctccggaagcttggatgcccctccacaccctcttgatcttccctgtgatgtcacctggacccctgctgctggcattggccacaaagcctcctggtctggctccaaagcctggcagggtcttttccccgggggagctgcaggcagggaacagtcctgatgggtcatccccttcactcccagcccagagcccccggccaggcacccccagggaaggctctggtggagaacctgtgcatgaaggccgtcaaccagtccataggtgagcctggctgcctccagctgggtggacagatgggggctggagaaggggagaacaggaaagaggggttgcctgccctgtttcctatataagtctgaggaaggggagggggtcgccatgggaatgtgctgtaggggaggcaggtgttgctcggagccccagcctctgttcctatgcaggcagggccatcaggcaccagaaggattttgccagcatagtgctcctggaccagcgatacgcccggccccctgtcctggccaagctgccggcctggatccgagccagtgtggaggtcaaagctacctttggccccgccattgctgctgtgcagaaggtcagtcctacctttttctttctgagagcctcccaaccccgagatcacatttctcactgccttctgtctgcccagtttcaccgggagaagtcggcctcttcctgatgggcaaccacaccaccgcccggcgccgtgcccttcctttgtcctgccctctggagacagtgtttgtcgtgggcgtggtctgcagggatcctgttacaaaggtgaaacccaggaggagagtgtggagtccagagcgctgccgggacccaggcacaggcgttagctcccgtaggagaaaatgcgggaatcctgaatgaacagtgggtcctggctgtccttggggcgttccagggcagctcccctcctggaatagaatctttctttccatcctgcatggctgagagccaggcttcctgcttggagtccgcaggaggctgtggcagcagtggcatccactgtggcatctccgtcctgcccaccttaagaggcgagatggagcaggtccatctgcctctgccctttctagccaaggttatagctgccctggactgctcactctctggtctcaatttaaaatgatcccgtggccacagggctcctgcccaggggcttgtcaccttcccctcctccttcctgagtcactccttcagtagaaggccctgctctctatcctgccccacagccctgcctggatttgtatccttggcttcgtgccagttcctccaagtctatggcacctccctccctctcaaccacttgagcaaactccaagacaccttctaccccgacaccagcaattatgccaagggccattaggctctcaacatgactatagagaccccgtatcatcatggagacctttgttcctgtgggaaaataaccctcccacctgcaacagctgcccctgctgactgcgcctgtcttctccctctgaccccagagaaaggggccgtggtcagctgggatcttctgccaccatcagggacaaaccgggggcaggaggaaagtcactgatgcccagctgtttgcatcctgcacagctacaggtccttaattaaaagtgtactgttggtttctgctgagtttttta

SEQ ID NO: 741 - DNA, 294 bp, Homo sapiens
tattttaaaacttttttatgcaaaaacatgttatagggtggaatgcaacatttttatgggcctgtgggccatttgtatacatctttggagaaatggctatttaagtactctgcccattaattctaaacttaaaactaagacttcaaagtccctctaaggattttgctgggccacatcccaagaccctgaagggtattacttactcgccctctccaaactgccgaagtcggaagcaggtgacaaaaaagctgaccctggaatcaccttttgtaaatttcccacctccaagctttt

SEQ ID NO: 742 - DNA, 11749 bp, Homo sapiens
agctctttggattcactgaacggtacggagcagtgttctcatcccgggagcagcccaaactggctgggtttcagcaattcctgcagagcctgcagcccaggacgactgaaggtgaggcaggagggtgggcaggcagagccggctgcacgcatgggcaaggacttctgttcctcatgtgtggacctgaccagagggaggcctcctccccgttctgctctgtgcagctcttgcagcccctgcagacgagagtcaggccagcaccctgcgaccagcttctccactgatgcacatccaaggcttcctggcagctctcactacggccaaccaggacggcagggtcatcctgagccgccaaggtaatcaggtggttcttggccaggttcagttcccaggaaggagccaagctgagcccgggagccgcagcgtgaaaggattctttccttccatcctgggaacttcctgggttaggaggaagcagtgcagtgggcactggcctgctgtgacctgggcaagcagtggaggtggatgggaggagatcgaagggctgggatgggggtcccgtgaccagggtaagcagtggaggtggacgggaggagatcgaggagctgggatgggggtcctctagggcaggggtcctagggaaacttctactgtggggtaggtgggctttggtttgggtcatgattttgtcatctatgagccttgtgatttggactattttctttctcaacttcagtttcttcatatgaaaatggagaggataggccgggcgcggtggctcacgcctataatcccagcactttgggaggctgagggggggcggatcgtgagttcaggagatcgagaccatcctggctaacacagtgaaaccccgtctctactaaaaatacaaaaaattagcagggtgtggtggtgggtgcctgtagtcccagctactcgggaggctgaggcaggaaaattgcttgaacccaggaggcggaggttgcagggagccgagattgagccactgcactccagcctgggcaacagatcgagactccatctcaaaaaaaaaaaaaaaaaaggatggagaggacagtgtggtccacctctgtgggctggttgtcctagagattaaatggtgtttaatttaaagagaaagcactagcacttgtgcctcagacctggactcacctgggggaccccctttgctgggacgacagaagtgtctgttgggcttgcactcacctcccaccgatctgtttttccaggcagcctcagtcagagcaccctgaagtttttgctcctgaatccagctgtgcactttgcccaagtggtgaaggaatgccgggcagtggtcattgcggggggtaccatgcagccggtaaggacacctttcccagcccctcgtgccccaggtgttgggatgagatgggggcttgggagagatgcattatcagtcctgttctctcctggggccccaagccagaaagggtcagctcgagcaggcccagtggtgtccgctgggtgacactgctattctctcactgctgtgccttttaggctgcaggagcagtggagactcctctgctgctccattctgtagccccaggatcacatgtctcccagagaaagctgttctgtggtttcaaactcaaggaaaaaaatcatgattccacttttaaaaggttcattttgatgtatatgaatataatagtctttgtaggcgtaatttttacttatgtgcatagctgttttaaaaacaaaagtacggctccctccatgtgctgtcactggaacttgctcttttcactcagcagccagagggtcataaaccctgtctccttgtcagcaagcatgcacgtatttcagtatcccagctgtgctggattccagttacacagatatatagcatttcatgtagctgcttctctcttgttaggtgtgcaagctatttgcagttttctgttttgagcatgactgtgataaatataaccgcatttctgcacagtggtgactcctacctagcgaagggcctcctggacaaaaagctgctgggaatcctgaagcagtgcttcccagccccagctgccttagcttttgatttttatatttttgtatggatagattcatagttttattcattcggcatattaaaagttgtttacagtaattattgtttctgacgttcacattgtgagagccccttcctgctagctcaggtcctccccgtggcccggtcagtctcgcctccagcacagcagaatgtcatgggatcaccatgggtgtcctttccccacactggattgattcatttctccaagctgctctggtttcttgtaatggggaatgacatttagaagtcaagctgtgggtgctagggtgtttgtcgtgctcctggggcgttttggtagacagatctaggaaatgttttcagaatgaatccatactggtatttctttctttctttctttttttttttttttttttttgagacacagtctcgctctgtctcccaggctggagcgcagtgacctgatcacggctctctgcaacctctgcctccggggttcaagcgattctcatgcctcaacctcctgagtagctgtgattacaggcatgtgccaccacacccagctaatttttgtattttagtagagatggggttttaccatgttggccaggctggtcttgaaatcaggtgatccgccagccttggcatcccaaagagctgggattacaggcatgagccaccacgcctggcccatattggtgtttctaagtaaaaatcaaaggatttgtttacttgaccttttattgtacctctttttctcttaagcctgaacatgtgtgctacattaacatacttatctgctctatcctataatatacttaaaagttttgaaatcatagtaccaatattacttctaacaatagatctgattgaaattgcctttcctctttgcctttagagtgtaacccactaaggatgcctggtcactaggctctaaagtcacgtggaaccaggcttctctccgtgtgcttctgttgtcagtttcatagataactaggctgtttttgtttcattttcttttcaattttagaatttgcttttttcttttctgacttgtagtttttaaatatgtaaatatttgtatggctcaaaagtcaaagcaatataaaaagatctattcaggaaagcctcactctcatccctttccagcccattccccacccccatagggaatccgttttactagcttatcctttcagtctttctttttcccctaaataagcaaaaacgtgtcttcatttttccctttcctgttttatttacacagaaggcatcttagtcagttgtctgaccatcgctcctctagtgggctgcgtggttctctgttggacagatgtagggagcttatccaaccagtaccctctggataggcaggcgcatgattacagggaaaggtccgggggcacatgctgtttggtatttgtgggctgtatcttctcactggactcctaaatatgggattcctgggttaaaaagtataaatatgtttaatttgttaactactgtgaaatttcatgagaattgtaccattctgtatcccaccagtactgtctaggaatgcctgtttctccagagtggttacttttggatttttgccagtctaacaggtgaaagcctggagattcttattcagtagtttgggctggggcctggccatgtgtatttttgaaaattttcgctggtgattttgctgcatggccagggttgataatgactgtgccagatttgctggatttcctttgctgttcctgcacatagtttaaacgagactgccagcactgggtatcagtcaccatttttctttttgttagtttgccatcagccttttctttgacctcttctttcagtttgtgtgtacttgctgtctcttagcccagacttctcgcttcctttctgctgggcctctgaggggtcatggggccgtgacgctgtggccttggtctacaggtgtctgacttccggcagcagctgctggcctgtgccggggtggaagctgagcgcgtggtggagttttcctgtggtgagaagctgtgcccagggtggggcaggctagaggtcaggttctggcccccgttttctgtgggtaatacctcatactgcgaccaggcacaggggcggaggagaccccggggtgggagcctcacccttcgtgcgctcgcccaggctctcctgctttgctccctgctgcctgctgcccagtgtgactggtgatggtgggcgggtgagcgctgtcagtcgctgttcctgtgctggatgatggggcagggaaatgccctctctgcagtgtcttgcagcacacctgcatctccagttttcggcccctccctggctcttaccaggtcacgtgatccctccagacaacatcctgcccctcgtcatctgcagcgggatctccaaccagccgctggaattcacgttccagaaaagagagctgcctcagatggtcagtcccagccagctcgccgcaccacagcctggcctcaggcagcaaagggttttctggggcaggggcgctctggcccaccctgagtgttttcagtgttggggaaattgcacagggacacccgcttagagccacacagaatgagcggcgtcgatctagatgcttatggaggaaggtctgagcttccccgcccctcacgccttaggctgcgaaatatgtattcataaaacctccaggcatcctctgaggacgcctcacacaggagaaagctgctagttccctttggctctcttgccctttggttatatctgcccctgccgggggtagggatgtggggcttgggggcatctcctgtggtgtgcctggggtgtgcagcccctgattgtcgttgtggtgcccatcaggaccctggacagaagaagggaggactcagtgccagggcaatagggaggccccctagggacgctagtgctgtgacatgtgtcagaaaggcgcagtcagcagcagcggctgggtgtgtttggtgggaggtggcacctaccaccccgtggttcccacccaggggagccaagtcctcttccttggctgtagtcctgccgagggtctctcctcagttttgagtctcaaggtgaagacgcggtttgtgggtggctgaggggttgctccatgggggctccctccctccctcctttccttccttagatggacgaggtgggtcgcattctctgtaacctgtgcggtgtggttcctggaggggtggtctgtttcttcccctcctacgagtacctgcgccaggtccatgcccactgggagaagggtggcctgctgggccgtctggctgccaggaagaaggtgagtggcctgtcggcagccttcccacttgtgaggacagtgccactgagtcctcctgggagctctcgtgctcatcgggtcaggacaggcttctggctcctcatccccaccgctcccagtccctgactacagaggatttcccccaaagtccctggctgtgaggttctccagtcccctggccagaaaacacaaggccacgagcagactcgagacctggcaccctgaacctgtctctgggaaatgtcctctgtctttctcagatattccaggaacctaagagcgcacaccaggtggagcaggtgctgctggcatattccaggtgcatccaggtgcgggcgtcatgctgggcttgggtctgagatcgtgtgggggtggcagctggaaacgttgtgggtgtcatccaagttttggctcagcaactcagcgtctgggtttctcctacaggcctgtggccaggagagaggccaggtgacaggggccctgctcctctctgtggttggaggaaagatgagtgaagggatcaacttctctgacaacctaggccggtaagtagtggttctgctcgtctcctgggccgtgatacatggccggccctcactcccagcagctgggcccctgcctgctctctgctgccattagagcccacagctgggctgcgactgctcagaccagccagctggagggaggggctcagcagctctgggtttggtcctgggagagcagttggattttaggctacccattgctgtatcaggacccagtcaattggcctagacgggatctctcagccgaacaagccctctccaggtggtaggtacagagtggagagaggctgagttttgatcacagtcggagaggctgagggaaggggtagaacggagcagctggtgacgtgggtgatgacccgggaggtcctgacgtccacctgctgggctcttgtctcccccgcccaggtgtgtggtgatggtgggcatgcccttccccaacatcaggtctgcagagctgcaggagaagatggcctacttggatcaaaccctcgtgagtgaccccagtgtcacagagggtgacaggagagtaggcagtgggtgggagtggcatcacccccagggctgatacagccaggccttccccgctgcgctggcgtctcctgccccctccggaagcttggatgcccctccacaccctcttgatcttccctgtgatgtcacctggacccctgctgctggcattggccacgaagcctcctggtctggctccaaagcctggcagggtcttttcccagggggagctgcaggcagggaacagtcctgatgggtcttccccttcactcccagcccagagcccccggccaggcacccccagggaaggctctggtggagaacctgtgcatgaaggccgtcaaccagtccataggtgagcctggctgcctccagctgggtggacagatgggggctggagaaagggagaacaggaaagaggggttgcctgccctgtttcctatataagtctgaggaaggggagggggtcgccgtgggaatgtgctgtaggggggaggcaggtgttgctcggagccccagcctctgttcctatgcaggcagggccatcaggcaccagaaggattttgccagcgtagtgctcctggaccagcgatatgcccggccccctgtcctggccaagctgccggcctggatccgagcccgtgtggaggtcaaagctacctttggccccgccattgctgctgtgcagaaggtcagtcctacctttttctttctgagagcctccccaccccgagatcacatttctcactgccttctgtctgcccagtttcaccgggagaagtcggcctcttcctgatgggcaaccacaccactgcctggcgccgtgcccttcctttgtcctgcccgctggagacagtgtttgtcgtgggcgtggtctgcggggatcctgttacaaaggtgaaacccaggaggagagtgtggagtccagagtgctgccaggacccaggcacaggcgttagctcccgtaggagaaaatgggggaatcctgaatgaacagtgggtcctggctgtccttggggcgttccagggcagctcccctcctggaatagaatctttctttccatcctgcatggctgagagccaggcttccttcctggtctccgcaggaggctgtggcagctgtggcatccactgtggcatctccgtcctgcccaccttcttaagaggcgagatggagcaggcccatctgcctctgccctttctagccaaggttatagctgccctggactgctcactctctggtctcaatttaaaatgatccatggccacagggctcctgcccaggggcttgtcaccttcccctcctccttcctgagtcactccttcagtagaaggccctgctccctatcctgtcccacagccctgcctggatttgtatccttggcttcgtgccagttcctccaagtctatggcacctccctccctctcaaccacttgagcaaactccaagacaccttctaccccaacaccagcaattatgccaagggccgttaggctctcaacatgactatagagaccccgtgtcatcacggagacctttgttcctgtgggaaaatatccctcccacctgcaacagctgcccctgctgactgcgcctgtcttctccctctgaccccagagaaaggggctgtggtcagctgggatcttctgccaccatcagggacaaacgggggcaggaggaaagtcactgatgcccagatgtttgcatcctgcacagctataggtccttaaataaaagtgtgctgttggtttctgctgagttttttattgatatgtgctgctgttttctctggaagcctctttagggaatcgaggagcgcactggtgcaggggctgggtggagccatcctccgatggagcacaggcagacggaagcccccaccccagctgcgtggcctcaagccagcctcccgctccccgaaggtggtctccacacagacctgggacagtttcatccccgccccttccagggcagcagggctgaggatcccattctggctgtgtccacgtccgggccatggctagagtctgggtttaggggaggaaggcatggcggcgcccgctaggatttccagttgtcctcttcttcctctgcctgtggctgctgggggttagcagagacggtttgttgtctgacatacgggctctctcctcccggcccctcaccagccccagaggtgaaaaggctggaggggaaagggtgagtgagggaggtctgtggggagcactggtttccccaggccccagagacttaaacacaggaagaaaaaggcaagagagaattaacgatgccacagcccatggcagacagcggccctgcctcctacccttgcgtctcaggaccagcttgttgaagagatcccacatcagttccctgccttggcttacggctctcactgcaataggaaagccacggagtggggtgtggggttcagtcacatttgacccccggctccgtgttcctgtcccctgtagtgtttttgttattagacccttttttctccttggtttaggaatgggggccccagggccacccttgtccaggctccctctaccgtagaggtgagaattccagggagctacaatttgaaaaccactattttatgagccaagtagaacaagaaatgacaactattaaaaaaaataagggatttctgaccagctaacaaccccacagaaaatccgccagggatccagaaatgagactgaggtggcctcagagagctccctcctgaaggggatgctgctgctgtcgtcctgcccggcgccttggactgcagtggccggggcctggggtggggatgagggtgcactgaccagcaccgcagcagctgggggaggttggggtgctgttaacgtgccatcttataggtaggaagtggaaatgggagaaagtgtggggtgcctagggaaggaggtgactgagcagggagcctggctgccatcctaacacccagctcactgggcttgagcgacttgagcctggtgccagggcagagtgggtgatgctggggcccaggctggcaccatacttgaggtctgccaggcaggtcaggtaggatggcacatcgaccttgggggacttggcccaggtctggcatgtagaagtagttctctgggacccatgggattaggtggggacatgtgagaggtgacagggacctgcaggagcagctagcgagacctcatgtgcaccctgcacagctgtggtggcataagggattcaatagagcctctcctagagaggagcctggcagggcccccagcccttgcacctgcccctccctctccaccttctgctccagctgctctctcactgatggacaaggggcactgaacagtttatctgtctctacccccagcatcacatgggtctttgttacagcaccagccagtccgtctgggaagacagacttcttgtatctacaggggcgacgtggaggtcaggcaagccggcacctgctgtcctgggaccatgttcctgacctacctctcccatgtcatcagggacactgcactgaggggtcccaggccactgagccaagccaccctggtcaccttctggctcccacctctgtgctgcacctgagtgtgatgccctaggaccccattaagtcaggctgagtcttgcacccacaccctgcgactccattttctgctacacaggatctctctgatgttgacgagcagcatggagacctggggagaccccccaagcgcctcctccatgtcatccttgggctccagcttggcgctcacacacacaggaaaggacttcagcttctcctgggagggctgggtggctgaggggtggtggatttcggagttggactagcagctggcctagaggctactggggaggagggagcagggagcacccactcctgatccagattcactgcttccctcgcatctgtcatgaccccaaagaagcagatcctgaacctgggctcttgtctttacctttgttctcttccactctggggtaattaagaatgatttgctggccaggcgcggtggctcatgcctgtaatcccagcactttgggaggctgaggcaggtggatcacaaggtcaggagatcaaaaccatcctggctaacacggtgaaatcctgtctctactaaaaataatacaaaaaaaattagccagtcgtggtggcacacatctgtagtctcagctactcgggaggctgaggcaggaggatggcgtgaacctaggaggcggagtttgcagtgagtggagattgcgccactgcactccagcctgggcgacagagtgagactccgtctcaaaaaagaaaaaaagaatgatttgctaattaattatgcaggcagctgatccagtgctgtgtaaccttgggggccaccagatgccaatcaatcagtagaatgggagagaaggatggaggaagtgaggacaaggggcaaggaggaaggtctgtccacctgtctcttctgtgcaggaggtgtccaagcaggaggagcacgtcacatccccactgaaaaagcccacagaaaatgaaaagcccacatgcttgtccattgctgcaggatgggggcaagtggagggggagaggtgtcggcgctcccaccttactcccagtcatggctgactcctccctttccttcgttcttgttcctaatctgtcaccatgtcctgtcgttttctttgtctcacccaaccctctctgcctgaaaatcccctgacggcagcctcatccctgtcacctcctgactgtagttggtgacagaagaggaggctgcactagtgaaggagcagggactccaggtctggcaacaaccagggatggggccgggtgggggtgacttggaccaggagaggggcctgagtcaggcagtcacatacttcatgctggggtcccccaagtgaagcacatttagcaagatctgaaatacagggaaacagtcttgtttcttcaataaataaattgcaaaggagaaacaattgatgaaaggagaaacctatagatccagaaatactaacaggcaaatcaaacaatcataaggagagactttatttggattttgattcaaacaaactaacaaaaaaatgaaattactggaaatttggagacagtagggtagttggtagtattaaagaatagtagtgtgcgatggttggtatgataatggtattgcaattttgctttttttttaaaagagttcttggctgggcacagtggctcatgcctgtaatcccagcattttgggatgctaaggcgggaggctcatttgaggccaggagttcatgaccagcttagccaacatggcaaaaccccatttctactaaaaaaaaaaaaaaaaaaaaaaaatacaaaaaat

SEQ ID NO: 743 - DNA, 636 bp, Homo sapiens
ggtttaggaatgggggccccagggccacccttgtccaggctccctctaccgtagaggtgagaattccagggcgctacagtttgaaaaccactattttatgagccaagtagaacaagaaatgacaactattaaaaagaaataagggatttctgaccagctaacaaccccacagaaaatctgccagggatccagaaatgagactgaggtggcctcagagagtggctccctcctgaaggggatgctgctgctgtcatcctgcccggcaccttggactgcagtgggcggggcctggggtggggatgagggtgcactgaccagcaccgcagcagcttggggaggttggggtgctgttaacatgccatcttataggtcggaagtggaaatgggagaaagtgtggggtgcctagggaaggaggtgactgagtagggagcctggctgccatcctaacacacagctcactgggcttgagagacttgagcctggtgccagggcagtgggtgatgctggggcccaggctggcaccatacttgaggtctgccaggcaggtcaggtaggatggcacatcgaccttggggacttggcccaggtctggcgtgtagaagtagttctccgggacacacgggattaggtaggga

SEQ ID NO: 744 - DNA, 274 bp, Homo sapiens
ccatgacatcccttctcattaaacgtgggaaacaaaaaaggatttagatagagggcaattttaggaataaaataaataatgacagtaatggattataacccactgaataaaacagaaagacacgagcccataaataaacaaatgatttaaaagtttgactaggaatgggaatcctaaataatttcaaattgcctccccacaaaatacttattaattagaaagaggaaaaagagacacgctacagtgaagaaatctgggaggccctatcttaatc

SEQ ID NO: 745 - DNA, 274 bp, Homo sapiens; identical to SEQ ID NO: 744

SEQ ID NO: 746 - DNA, 895 bp, Homo sapiens
catggcctcctgagaatccgacaagacgtaaatagccaagaatatctgtgaaacttcatcactgagttacaatatttatcactgcaagtgtgttgttcattgacactataaagccatgtggaattaagcagccttgaaacacaaaatggagaaaggctaagagctgagaattgttgccttcagggaaatacaatcaatgtcaagcaaacaaccaccccaaaatggttagctttatcagcattcaggcctacagtgaacgcaaatgttccagatctgagtttcaatttttaaagaataaacatatgcaaatgaccattagtcttagtagttttagggctcagaatgatcttatcttgttaacattcagggcaactgcttatacccatttgaatgtcatttagagggctaggaaagactgcttcaacatttgatgactaaatggcagggctcagccacaatgctcactccgagaaatgagaaatagacacaccagtatgctagatgctgatgcagttcaggaaatgctaccccaaaatatggcccctcagcatactgagtattttaagcagaaggcaattaagaaaaccacaaaaacagaaaggtccctctgaccttctcccaccctctctctcttgaagatcctcatgtgacaggtgacctgccatataatcagaaggaagaaatgttacacagagaggctgagaagaatctgaggacttgctaagttttccccagtttattaccattagatcatatgccttttttgttcaatcatacttctatacaactgtccatcattcattaaacctaaccacaaaagtagttttcactcggtttttgagtgaaggctcctgtgtcacataaaacttacattaaataaatttgttccactttt

SEQ ID NO: 747 - DNA, 431 bp, Homo sapiens
tatttcctgacttggcttagaattgtgatgatgattgtaagaccagcctttgaagtaaaggagtttgagctgcacctttaccccatgtgcctgtagactgacacatggtgtcaccaacattgagcaccccctgccccccactccagacactgtgctctctagtaggtacactcatctctacctgccttgcaatatttgtatactgcaggggcaggtgtctgggttctggccctggctctggactctagtgtcctgatggagaaagtaggtagggagactggactggattagtggtgtttgaacttttttttcttttgtttactggaacctcttttccaaatgaaatcttaaaggcaaccctagtatataaaagagtgaaggaggaactgctgaggatgaagctgagcatggggcccccatcctcttttccc

SEQ ID NO: 748 - DNA, 436 bp, Homo sapiens
gtgtttatttcctgacttggcttagaattgtgatgatgattgtaagaccagcctttgaagtaaaggagtttgagctgcacctttaccccatgtgcctgtagactgacacatggtgtcaccaacattgagcaccccctgccccccactccagacactgtgctctctagtaggtacactcatctctacctgccttgcaatatttgtatactgcaggggcaggtgtctgggttctggccctggctctggactctagtgtcctgatggagaaagtaggtagggagactggactggattagtggtgtttgaacttttttttcttttgtttactggaacctcttttccaaatgaaatcttaaaggcaaccctagtatataaaagagtgaaggaggaactgctgaggatgaagctgagcatggggcccccatcctcttttccc

SEQ ID NO: 749 - DNA, 495 bp, Homo sapiens
ccccagtgtgttcttgaagcccttcctacactgattgtggtcaagtcagaacctgcctacacagtgcaggcccatcatgtggcattcaggacgttgctctccaagcctgcgcagcacaggaatgcctgctctctgtttcctttaccagtgctcagtgacctttaccagagacctgttcttgctgactctgattgtgtgcttctctgattagaaacgaatttttcttggctgggtacagtggcttatgcctgtattcccagcactttgggacgccaaggtggaagaattgcttgaacccaggcattcaagactagtttgggcaatatggcaaaccctgtctctacaaaagaaaaaaaaaatacaaaaattagctgggcatcgtgcgtgcctgtagtcccagctacttggtaggctgaagcaagaggattgcatgagcctgggaggttgaggctgcagtgagtcgtgttcactgagaccctatctcaaaaaaaaaaa

SEQ ID NO: 750 - DNA, 1543 bp, Homo sapiens
ggagtgattttgctagtttgacttctccaaagcctctgtgtaggtggtagggagtgagtcaaagcactaatagaccaggcaacttaccacttggagtggatttgccttacttttgccctctcccattttctgttttgagttatttatcttgtaaagtctgttttcctttcccaaggaataattccttttgtctacctaacattgacttatgtcttagactgacactgttttaggcttttcactaggcacattccgaaggtaccaacaagttaataacgtcacctactctccactaatagatgctatgctaagagaagtgaataatctttctttggtagaaaataggctgagatataaggtgatattgctattgacctgaaaatgtgatagaacttctggttgcctattgattattcctccatgtctgataaatgaatctgcttcctaccatttgtacttgtcttggagctggctataaagaagtatgctggtttgttatgtactcttttcaacagtatcatagcccaacttcatctcattgaattgttcacatataccagagtactctctcttgaggaacacctgcaggcagatagttagggatgaccatgaggagcataatcaacagggatagaagtacacttatacaacagcacttacatgggcggtttctctggtagcatgtcccataagaggccatatgcttataattaatgtgtaacttgttgatgcttttgagatcaggactgctccaggcacgctaaaaatgtgctaaagtatagtgggctctctaaaaagaggctatttgggagtctctgaattttgtttcagagtttagccatcagaaaggtgagtttggccatcagagttttgtcctgtgcaccataaaagtctctgaattttcgtttcctcatgtaccttaatttctaaaacggatgataaaagttaggttggacacagaaggggcaatcaaatttctgtattcagatacctcttaaaggtacactgtgccaccttgctgcctttgattgcaaatacaaagttaattttcaaaaaggaaaaacaaaacagctctttttcctaaaacacatgttgtacttcagacctaaaattctaagtcttatttgtttctcacccatgagttagatttaggtaatagtattagtagagtccttagagaatcttaagaggtcatttactccacctctttcattttaaattggggtatccaaagcctgaagaggtggcctggccaatattgaccaaggtataactaaatatgagctagcatcttcttccttcttctcgctatcccttggctttaaaagatttagtacatgaagaataatgcattagcaaaaagctcctagtttgtgtttcccctttgtgtctccctgttggctttctgagacaacctgaattttgccaacaaaatatcgcagagggatttatattaattattttttagttagatgaatattatattcttcccatccaagtgagtgatttgctaggtttgtttagggagggaaaaagcaagaat

SEQ ID NO: 751 - DNA, 1543 bp, Homo sapiens; identical to SEQ ID NO: 750

SEQ ID NO: 752 - DNA, 785 bp, Homo sapiens
agattgttaaggtagaatctattggggatgtatcagaggttagaagtaaaaaagatcagaaccagtttatttcttctgaacccactgctttacattcatcagagccccagcactccctgataaattcaactgtggaaaacagagtaagtgaaatagaacaaaaccatctccacaattatgccctttcttatacaggcagtgataacatcatcatggcctcaaaagatgtctttggccctaatattcgaggtgtagacaaaggcctacagtggcatcaccagtgcccaaagtgtaccagggtgtttcgtcacctggagaactacgccaaccatttaaaaatgcacaaactctttatgtgtctactctgcggcaagactttcactcagaaaggcaaccttcatcgacacatgcgtgtgcatgccggaattaaacctttccagtgtaaaatctgtgggaaaaccttttctcagaagtgttccttacaggatcatcttaaccttcacagtggagataagccccataaatgtaactattgtgatatggtttttgcacataaaccagttttgaggaaacaccttaaacagctgcatggcaaaaacagctttgataatgccaatgagagaaatgtacaagacctcacagtggattttgattcttttgcatgtacaacagtcacagactctaaagggtgtcagccacaacccgatgcaacacaggtcctggatgcaggtaaactggcccaagctgtcctgaacttaagaaatgatagtacttgtgtgaattga

SEQ ID NO: 753 - DNA, 1761 bp, Homo sapiens
tgatttttgtcttttgttcaaatatttaaaatgataatacagttgagtggtaagactaataggtaccttatgcctaacatcactcattatatggtctaatgatgcttcctagcattgtgatttttacatgatccagccaaagagtaccaattctatgcaatagtgagactctaccctgtcaaccaaacagcattttttggtattttctgtcaacatcatttcttcacagggaaatttcaagttggagtgcttcgtttgctcacattcatgtcttgtttttgttactggtttgaagactaaaaggcacgggttcaaataagattggtctctttggttggagactatttctgggttcattcagttgttcaagaaacattagttaagcacctactgttgctagacactatgctagatactgaggataatgaaggtaagattgatatagtccctgccctcatggagcttatagtctcatgtggtcttagtgaaacaaagtctcaatttgcttttatactagaaataataaagaaagctgccttgctgtattcgatcagttaaaatcagcaactttgtgcttttgtatcagtaaaacatttagttctcaccttttgaaaatgcaaaccactgaagtgatttacagtctcctccatttttggctggagaggtgttctgtttctgtgagacatttttctaatttttgtggaacttcactttcctccttctttgcttatacgtgtttgttagattatattgcaaagaagtcaagttactgatatccagtattttacagaggaagatgactttcaaaactagtcatatttctgtagaggaggaagatttttaaaacctttatcattcagcatttgtattttatggatccccaggagaactaaaaaggagatgactctctaccatagtttggtttaaaaaaaaattactctgtcagttatttatttattatttaatactaaactccaaactgaagtggctctgaggtaaatcagatatgattttaatttaagtttctttattagcagatctataaatggaaggtgaccaatgtcactgcttctaaaatactgtcctaaacaacccagaagattttatttcagctcatgaatagctgttctaaatctgttgtatgttagacatactatgaactacctcttcacttattatggggaagtttccttaataaaagtgtgacgattaaagctctggtgtcattggttattttctcactctcccctccttctattcttttttaattgctttactttgaatacaggaaggtcttctttatgtatagtcttaaaaatacatattaagcatgctgagcttgccttcagaaaaaaatacgaattaatcagaaagttgttactagattcatttacttccacgagaacctgttgctggaggagcagagcaactgcctttaagaattggttcagaggcggccgggcgcggtggctcacgcctgtaatcccagcactttgggaggccgaggcgggtggatcacaaggtcaggagatcgagaccatcctggctaacacggtgaaaccccgtctctactaaaaatacaaaaaattagccgggcctggtggcagggcattagtcccagctactcgggaggctgaggcaggagaatggcgtgaacccgagaggcggagcttgcagtgagccaagatcgcaccactgcactccagtctgggcgacagagcgagactttgtctcaaaaaaaaaaaaaaaaaaaaaaaaaaa

SEQ ID NO: 754 - DNA, 1761 bp, Homo sapiens; identical to SEQ ID NO: 753

SEQ ID NO: 755 - DNA, 785 bp, Homo sapiens; identical to SEQ ID NO: 752

SEQ ID NO: 756 - DNA, 540 bp, Homo sapiens
ctttgagggggttagactatacaatcgacatttaatgagggcctcctgttttctgggcacagcacgaggcccgaggacacagaggtgaatcagactctgcctctgaccttgaggagcttctggaccagtggaaaggaaggcagtcatgaaaactgatgatccactgaggttctgctagaactaagtcgtccaaagtgatatggagcatcagaggaggcttctgggagaggtgacatttcagttgggcctcaaagaatgacaggggaggtgccagacagagagggcagaggattggcactccagagagcatcatgggcaatggcacagaggtatgaaacctcctggctggattcaagggatagttacctaatgtggtcataggacaggacagagggcagggctgataataggcagcccagtgggagtggttggccttgaagagttggaattttttttttttttttttttgatacagggtctcaccatctgctaggctggagtgcaatagtgagatcatagctcactgcagcctccaactcc

SEQ ID NO: 757 - DNA, 124 bp, Homo sapiens
ttttttttttgagatggagtctcacactgttgcccaggctggagtgcagtggggcaatctccgctcactgcaacctctgcctcccaggttcaagcgattctcctgcctcagcctcccgagtagc

SEQ ID NO: 758 - DNA, 604 bp, Homo sapiens
ctggcctgcctctggtctcctcctacccccactaggctcagagaatctcccctccacacccacaccacaacctactttagaagggctgctgcatttcctccaggctttctgacccccttcctgtccctgcagggcaggggccccgaggagctggaggcccaagggccttgttctggtcccagggcctggggacacctgccaccgagggccaagaggaggatggacgtggacacagccccgagagcctggcccggacacagcagcagctctgcagaaccaaggcaagcattggggaccttgttgggagtcggggggcagcccaggggccagtgtctgaggtcctgctgtctgtctggccacccaggactccctcatccctggaaactgtgctttaccatggaggccacccactctgtctcctctaaggttctgaggctgaatgggctagggggcttgcggggaggccccagtgtccagcactgtgggacctggcagggtgcctgcggccaggacccagcggggccaggtgttggtctaacagtgcagcttcgttcatatccccagcccctgcccacctgctctgagcacagtgatggccctggga

SEQ ID NO: 759 - DNA, 98 bp, Homo sapiens
cacccaggctggagtgcaatggggcgatctcagctcactgcaacctctgcctcccaggttcaagcaattatcctgcctcagcctcctgagtagctggg

SEQ ID NO: 760 - DNA, 681 bp, Homo sapiens
gagacagagtctcactctgtcacccaggctgcagtgcagtggtgcgacctcggctcactacaacctctgcctaccaggttcaagcgattctcctgcctcaacctcctgagtagctgagattacaggcacacgccaccacgcccggctaatttttgtatttttagtacagacagggtttcggcatgttggccaggctggtctcaaactgctgacctcaggtgatccacccgactcggcttcccaaagtgctgggattacaggcatgagccactgcgcccgaccagaacaccagacattaacttgcatccagatgaagaaataaagagcagaggtaagggtaactatgtaggtatggtgaaagacaatataaacagttttgtttgtaaattttctgttttaaaggacagctgcctaaagcaataattacaaaactgtgttgatgggcttataatatatagagatgtaatttgtatgataataatagcacaagggagtgaggagagaataaaggtatattggagtgactcttgactgccactattgaaattaagtggatatgaatccaaaagagattgttttaagatgttaattgtaatccccaggctaaccactaagagaatacatttaaaatacatatggcaaaggaaataacaaaggaattttaaaagatacaatggaaaa

SEQ ID NO: 761 - DNA, 681 bp, Homo sapiens; identical to SEQ ID NO: 760

SEQ ID NO: 762 - DNA, 238 bp, Homo sapiens
ttttttttttttttgagacagagtctcgctctgtcgcccaggctggagtgcaatggcacaatctcagctcactgcaagctccgtctcccaggttcacgtcattgtcctgcctcagcctccccagtagctgggaccacaggcacccgccaccacgcctggctaattttttgtatttttagtagagacggggtttcactgtgttatccaggatggtctcaatctcctgacctcgtgatct

SEQ ID NO: 763 - DNA, 218 bp, Homo sapiens
ttttttttttttttgagacagagtctcgctctgtcgcccaggctggagtgcaatggcacaatctcagctcactgcaagctccgtctcccaggttcacgtcattgtcctgcctcagcctccccagtagctgggaccacaggcacccgccaccacgcctggctaattttttgtatttttagtagagacggggtttcactgtgttatccaggatggtctca

SEQ ID NO: 764 - DNA, 493 bp, Homo sapiens
atttttaaaaatcctaaagaatcaacaggtcaaaaaaagagatcatccagggaaagtaggaaatactttgagatggatgaaaataaaaacaccaaaatttatggaatactactaaaccagtgcttagagggacatttatagttaatgcttacattgaaaagaagatatatctcaaatcaataatctaacattctaccttaagaaactagaaaaagaagagcaaatgaaactcaaagcaaacagaatgaagaaaataataaacattagagtggaaataaatgaaatacagaaaaggaaacagtggagaaaaatctgtgaaatagtaagttagttctttgaaaagatcaacaaaattggcaaccctttagttagactcaccaggaacaaaagagaagatgcaaatgactaaaatcagaatgtgggaacactgtgatgttggcacgagtctgaatatactgaaagtccccaaattgttgtgtacactttttttttt

SEQ ID NO: 765 - DNA, 1216 bp, Homo sapiens
  misc_feature (951): n equals a,t,g, or c
tttttttttccccagtggttatcatgagacttatgtaaaacctcttgtattttaatagtctagtttaagatgataacaatttagagtattctgaatttcagtatgtatttaccatttttagtgacatttatactttagtatttttcatattgttagttagcatttcgtcatatcaatgtgaagatttcttccagaccatggctggagaaggaaagaaggtgtgttttgcctgattcagggactatagagagaaccaagttctgcaggcctgtcacctaagtctcagatgagtatgaattctcttgtgtttttcacagatttttgcagtggcaggaccaagttcaaatgagttatagccaagtctacagtaagatgtggcagtattctgttttgaaccgaggaccatgattggcaagcttgccacttggtcaagtgcttaccctctaaagatgtcttccttggtctttgcctccagctgggtgtcacaaactctgaactggattccaaggctttcatgaatgcacttatgtttcctgtggcagctgcattatgttgtgggggatgtggatgcagaacctcccattctgtcatcttgcttatgttactctcctttatgtttcactttctcaaatgaatgtcaagctggtgatttttagattcaaaaattctaaaataaattgctcaaatttccacattatgtaagctattaataaaatgtcttgtaggtgctacatatttattaaaatttttggttgtaattttaagctcactgcaggcagaaaggaatcattaacatttatattcttttctttagtctgtatctaaatgatggcatattttaattccagatatttactttatactgcagtaatgctcgtcatattttgcaaaatgtatgttgttcttttatttggaaatataaggcttttttagctcctgaaatctatattnatagtcatataattttattatgttttgtggtaagaagtgcagcaacatattgagaacataataaaattatcctgtatttttaatgattatttattaaattcctctcattagagcctgttattaatgattgtaatgtattttctgtataattttactgcaatttattaaattctaatgacttaaattgtctgcttttcatgagtgcacacagttgaatgctgtagatatctaaagaattatttttcggccggttgtggtggctcat

SEQ ID NO: 766 - DNA, 1496 bp, Homo sapiens
ttttttttttccccagtggttatcatgagacttatgtaaaacctcttgtattttaatagtctagtttaagatgataacaatttagagtattctgaatttcagtatgtatttaccatttttagtgacatttatactttagtatttttcatattgttagttagcatttcgtcatatcaatgtgaagatttcttccagaccatggctggagaaggaaagaaggtgtgttttgcctgattcagggactatagagagaaccaagttctgcaggcctgtcacctaagtctcagatgagtatgaattctcttgtgtttttcacagatttttgcagtggcaggaccaagttcaaatgagtcatagccaagtctacagtaagatgtggtagtattctgttttgaaccgaggaccatgattggcaagcttgccacttggtcaagtgcttaccctctaaagatgtcttccttggtctttgcctccagctgggtgtcacaaactctgaactggattctaaggctttcatgaatgcacttatgtttcctgtggcagctgcattatgttgtgggggatgtgcatgccgaacctcccattctgtcatcttgcttatgttactctcctttatgtttcactttctcaaatgaatgtcaagctggtgatttttagattcaaaaattctaaaataaattgctcaaatttccacattatgtaagctattaataaaatgtcttgtaggtgctacatatttattaaaatttttggttgtaattttaagctcactgcaggcagaaaggaatcattaacatttatattcttttttttagtctgtatctaaatgatggcatattttaattccagatatttactttatactgcagtaatgctcgtcatattttgcaaaatttatgttgttcttttatttggaaatataaggcttttttagctcctgaaatctatattatagtcatataattttattatgttttgtggtaagaagtgcagcaacatattgagaacataataaaattatcctgtatttttaatgattatttattaaattcctctcattagagcctgttattaatgattgtaatgtattttctgtataattttactgcaatttattaaattctaatgacttaaattgtctgcttttcatgagtgcacacagttgaatgctgtagatatctaaagaattatttttcggccggttgtggtggctcatgcctgtattcccagcaccttgggaggccaaggcgggtggatcacgaggtcaggagatcgagacaaccctgactaacatggtgaaaccccgtctctactaaatatacaaaaaattagccgggcatagtggcaggcgcctgtatccccagctactcaggaggctgaggcaggagaatggcgtgaactcagtggacagagtttgcagtgagccgagatcgcgccactgcactccagcctgggcaacagggcaagactctgtctcaaaaaaaaaaataaaaaaa

SEQ ID NO: 767 - DNA, 3891 bp, Homo sapiens
gggaaccgcccaatcaggcgcgcggtggcagaggagaggaaaggagggcgtggcttcctgcatttggcgggatctgtgtctctcgctggtgctggcacaagagcttgggatccgtctcctctttcgcctcctgcaccttgggagccccgggctactctctcacagcccctgttgccctgtgatctgtaggtcttgggggacgcatagttaaggtgccaggacatcctggaagctgggaaatggtgagtatacggggttcgccatcccgagaggggagaacagactgtgaaaccggcaggaccggcctccccacggttagctccgagtctcccgcagcttggccctcagtcccctgtggctgcaagatggccgctgggccagcagcgagggcccccacgtcccgtccggcccatccggtcctgtccctgggcagcgccctgctctgcgcccacagccatgagtatttcccagattgttcagggaggcctggtgggtcatcagggaaaaaccgcgactgggtgtttgcgtgggaggagctgcggcccgtggggtccccagtctctcttgttaaaaattaacgggagtctatgttaaaaggttcatcagtttatctgaacaaagagtgattggtgaaatggaaagcacccagccatgatttctggtccaccagaggggcataaaggaaaggcttttataagatgcatgagaaagcaacccaaattcaagaattggttccagttatatggtagccttatttgaactatccagatggaaatgtcctggttacatattcagaggttaattgcatgtttgtcatgggttaaacctgcattttgcttcaggctaagatagtgttttataggaaatatatttgagttaggttttagatttttttttgtttgttttttgctttttacctatgaacacagggcactagagccactttagactaattttctgatctttaattattttaacactccagaggaggactggttttctcctgtgtttttttaatgtatggcaagtggaacctctaatcgaccaccctgtttttcatcctaactcaggcttgcagtaaaattatcagttcccactttctttgctgcattctcaaatgcaacacatgagaccagctttcccttgccaatttacaatgctgttaactatatgtcctttattatacatttcattaaagttttctattatttggtttctttctacttctccctacagttctggcaatatttgctttttatatttagaagcctcccttttgggtgcataaatatataaagctatattctcttgagaaattaacctctattattattgtatggtaaactcatttcatgcttgtgagagacattgctagaaagtctattttgtctaatttaagcattaccgttgcactcctttggttattgtttgcatggaatatcattttctatcctttcacttttagcctatgctcttaattcataattgagtctcttgtaagcagcatattacgaggtttaaaagattaatttatccactctgtctgctttagtctcttttggctgctataactgaatatcacacactggtaattaataaagaatcgaattttatttgacttatgattctggaggctgggaagccaaaacaacatgatactggtatatgttgaaggtctagttgctggataataacatagacaaagatgtgagggagagagagctttttttttttaatatataacagatccattcttgttaaaattagcccattcccataataagaacattaatccattcatgagggcagagttcttagagcttaattaatttttaaaggttccacctcttaattctaacatgttggctattaaattttatcctaaattttggagatgacattcagtgtacagcagtatctgtttagtagatactttaatctttttatttgtaaggtagtgataggtaaggagttactattgtaaatttgtagttttctgtccattttaagtttgcttcttttttttctggttctgtctttcctgtggtattgttcatttttgttgagacaaagttatgctttcttgctcagactgaagtgtagtggcatatcacagctcactgtagcttcaacctcctgggctcaaataatcctcccaccttagccacccaagtagcttggactacagacacgtaccgcaacacccaaggagatttcatccttccaccttggcctcccaaagtgttggaattataagcaggagacaccatatccaatgtgtaatttttgttgtttgtgtatgctttaattactttctctttttctttactgcagtttttttttcctagtggttatcatgagacttaggtaaaacatcttgtattttaatagtctagtttaagatgataacaatttatagtattctgaaattcagtatgtatttaccattttagtgacatttatactttagtatttttcatattgttagttagcatttcatcatatcaatgtgaagatttcttccagaccatggctggagaaggaaagaaggtgtgttttgcctgactcagtgactatagagagaaccaagttctgcaggcctgtcacctaagtctcaggtgagtatgaattctcttgtgtttttcacagattgttgcagtggcaggaccaaggtcaaatgagttatagccaagtctacagtaagatgtggcagtattctgttttgaagccgggaccatgattggcaagcttgccacttggtcaagtgctcaccctctgaaaatgtcttccttggtctttgcctccagctgggtgccacaaactctgaactggatttcaaggctttcatgaatgcacttacgtttgctgtggcagctgcattatgtcgtgggggatgtggatgcagaacctcacattctgtcgtcttgcttatgttactctcctttatgtttcactttctcaaatgaatgtcaagcaggtgattttcagattcaaaagttctaaaataaattgctcaaatttatacattatgtaagctgttaataaaatttcttgtaggtgctacatatttgttaaaatttttggttgtaattttaagctcactgtaggcagaaaggaatcattaagatttctattcttttttagtctgtatctaaatgaccatatattttaattccaaatatttactttatacttcagtaatgctcattgtattttgcaaaatttatattgttcttttatttgaaaatataaggctttttttagctcctgaaagctatattatagtcatatagttttattatagtatttgataagaagagcagcaacatattgagaacagataaaattctgctgtctttttaatgattatttattaaattcttctcattagagcctattattaatgattgtaatgtatttactgtataatttttctgcaatttattaaatgccaatgacttccaatgtctgcttttcatgactgcacacagtttaaagctgtagatatctaaagggttatttttcagcccggcatggtggctcacgcctgtaatcccagcactttgggaggccaaggtgggtggatcacgaggtcaggagatcaagaccatcctggctaccacggtgaaaccccgtctctactaaatatagaaaaaattagccgggcatagtggtgggtgcctgtattcccagctactcgagaggctgaggcaggagaatggcgtgaacccagtaggcggagcttgcagtgagccgagatggcaccactgcactccagcctgggcgacagggtgagactgtctcaaaaaaaaacaaaaagggcttatttttcattgtatatttatgttgtattcaggattttatgcattaaaatctctcttcttattttca

SEQ ID NO: 768 - DNA, 5905 bp, Homo sapiens
gggaaccgcccaatcaggcgcgcagttggagaggacaggagaggagggcgtggcttcctgcatttggcggggtctttgtctctcgctggcgctggcacaggaacttgggatccgtctcctctttcgcctcctgcaccttgggagccccgggctactctcccacagcccctgttgccctgtgatctgtaggtccttggggacgcatagtcaaggtgccaggacatcctggaagctgggaaatggtgagtatacggggttcgccatcccgagaggggagaacagactgtgaaaccggcaggaccgtcctccccacggttagctccgagtctcccgcagcttggccctcagtcccctgtggctgcaagatggccgctgggccagcagcgagggccccacgtcccgtccggcccatccggtcctgtccctgggcagcgccctgctctgcgcccacagccatgagtatttcccagattgttcagggaggcctggtgggtcatcagggaaaaaccgcgactgggtgtttgcgtgggaggagctgcggcccgtggggtccccagtctctcttgttaaaaattaacgggagtctatgttaaacgttaaccagtttatctgaacaaagagtgattggtgaaatggaaagcacccagccatgatttctggtccaccagaggggcataaaggaaaggctttcataagatgcatgagaaagcagcccaaattcaagaattggttccagttatatggtagccttatttgaactatccagatggaaatgtcctggttacatattcagaggttaattgcatgtttgtcatgggttaaacctgcattttgcttcaggctaagatagtgttttataggaaatatatttgagttaggttttagatttttttttgtttgttttttgttttttacctatgaacacagggcactagagccactttagactaattttctgatctttaattattttaacactccagaggaggactggttttctcctgtgtttttttaatgtatggcaagtggaacctctaatcgaccaccctgtttttcatcctaactcaggcttgcagtaaaattatcagttcccactttctttgctgcattctcaaatgcaacacatgagaccagctttcccttgccaatttacaatgctgttaactatatgtcctttattatacatttcattaaagttttctattatttggtttctttctacttctccctacagttctggcaatatttgctttttatatttagaagcctcccttttgggtgcataaatatataaagctatattctcttgagaaattaacctctattattattctatggtaaactcatttcatgcttgtgagagacattgctagaaagtctattttgtctaatttaagcattaccgttgcactcctttggttattgtttgcatggaatatcattttctatcctttcacttttagcctatgctcttaattcataattgagtctcttgtaagcagcatattacgaggtttaaacgattaatttatccactctgtctgctttagtctcttttggctgctataactgaatatcacacactggtaattaataaagaatagaattttatttgacttatgattctggaggctgggaagccaaaacaacatgatactggtatatgttgaaggtctagttgctggataataacatagacaaagatgtgagggagagagagcttttttttttaatatataacagatccattcttgttataattagcccattcccataataagaacattaatccattcatgagggcagagttcttagagcttaattaatttttaaaggttccacctcttaattctaacatgttggctattaaattttatcctaaattttggagatgacattcagtgtacagcagtatctgtttagtagatactttaatctttttatttgtaaggtagtgataggtaaggagttactattgtaaatttgtagttttctgtccattttaagtttgcttcttttttttctggttctgtctttcctgtggtattgttcatttttgttgagacaaagttatgctttcttgctcagactgaagtgcagtggcatatcacagctcactgtagcttcaacctcctgggctcaaataatcctcccaccttagccacccaagtagcttggactacagacacgtaccacaacacccaaggagatttcatccttccaccttggcctcccaaagtgttggaattataagcaggagacaccatatccaatgtgtaatttttgttgtttgtgtatgctttaattactttctctttttctttactgcagtttttttttcctagtggttatcatgagacttaggtaaaacatcttgtattttaatagtctagtttaagatgataacaatttatagtattctgaaattcagtatgtatttaccattttagtgacatttatactttagtatttttcatattgttagttagcatttcatcatatcaatgtgaagatttcttccagaccatggctggagaaggaaagaaggtgtgttttgcctgactcagtgactatagagagaaccaagttctgcaggcctgtcacctaagtctcaggtgagtatgaattctcttgtgtttttcacagattgttgcagtggcaggaccaaggtcaaatgagttatagccaagtctacagtaagatgtggcagtattctgttttgaagccgggaccatgattggcaagcttgccacttggtcaagtgctcaccctctgaaaatgtcttccttggtctttgcctccagctgggtgccacaaactctgaactggattccaaggctttcatgaatgcacttatgtttgctgtggcagctgcattatgtcgtgggggatgtggatgcagaacctcacattctgtcgtcttgcttatgttactctcctttatgtttcactttctcaaatgaatgtcaagcaggtgattttcagattcaaaagttctaaaataaattgctcaaatttatacattatgtaagctgttaataaaatttcttgtaggtgctacatatttgttaaaatttttggttgtaattttaagctcactgtaggcagaaaggaatcattaagatttctattcttttttagtctgtatctaaatgaccatatattttaattccaaatatttactttatacttcagtaatgctcattgtattttgcaaaatttatattgttcttttatttgaaaatataaggctttttttagctcctgaaagctatattatagtcatatagttttattatagtatttgataagaagagcagcaacatattgagaacagataaaattctgctgtctttttaatgattatttattaaattcttctcattagagcctattattaatgattgtaatgtatttactgtataatttttctgcaatttattaaatgccaatgacttccaatgtctgcttttcatgactgcacacagtttaaagctgtagatatctaatgggttatttttcagcccggcatggtggctcacgcctgtaatcccagcactttgggaggccaaggtgggtggatcacgaggtcaggagatcaagaccatcctggctaccatggtgaaaccccgtctctactaaatatagaaaaaattagccgggcatagtggtgggtgcctgtattcccagctactcgagaggctgaggcaggagaatggcgtgaacccagtgggcggagcttgcagtgagccgagatggcaccactgcactacagcctgggcgacagggtgagactctgtctcaaaaaaaaaaaaaaaaaaaaaaagggcttatttttcattgtatatttatgttgtattcaggattttatgcatttaatctctcttcttatgttcaattctgtgttgttgtgtttcttttcttgggggggtatgttttctcagatcagttaattgtatttttgcttttaaagcttgatatcatgagttgaatgataattttttaactcggtacactttatgacaatgtgatatttaatttatatgtgaattagccgtgtttgttgcttatacatatatctatgtgtttttcacctatgtatgtcatttttttcatcttttttccttgtttttttttttaagtttcagatacgctttctttttcttttttttgtttttttcttttaaagagaattttaaaacagagtcaaatgaacaaaaatcagttatttgtcctcttgcagggcgggtagaccttccttccccacgggtttgaggctatggctaagtggtgagccttggggagatgcaggaaggatccatcccaggcacttggctagaggtaagtaaaaatagcctttggaccagaagacctgatagtttgggtactcgtctgaacataagtccccatcttcccagaaatgtcgtcttttgtctgcaacaactggctggagaaatatttcagaaagatgtgtgcctggaacacccaaagacgtacctttcctttctctttggcataggccttgtagcactgtagaaagaccaggtttgcaatggagccttcaatactcttcatccctatggatctcaggggctcatagggtgacaggagaggagacaagctagcttgggaagagtctttgtacttcagcttctcccctactgaaacactatatacttggggccacagttcatcacaaaacacacatgctctctttctttctctcacacccacatcttgggaacccaacaacttgatggcaggtagctctgggtatccttggtctggcattcacccactgggcatctaagctgtcctaaagctcttttcaatcacttctcactctttccaggcccatgtgggtaggtgttccagccttcactctttcaggctgatcatagaggcacagtgtgggaaaatcccctactgtgatggccattgctgggaagcagggaaggttaagggcccactgctgcccaaggctagtgcagaggccctctgctcctccactcatctcctcaaagaatgatatcaggtgcagcagctgctgtctggaatgttatcaaaccaggactgcacaggcactgcattctctgtgtggaagaggtaagaagcaggctagttgtccaggatgagttttcctcaggtccctccccagatggctgacgttcttgacatagcagccctggtgaaacaaacatgactcatgggtcaggcagccccaaaccatcccatacccgtccagctcacccgtcacaggatctgcctacttgttcaggctgggaagaagagagcaatgacgaaaacacatttaaacatttcctccattcatgtcaggaactcatccatataaggcctcatgagcacatggatctggtgcatggtcccctcaagctctacaggcactaggcagtcagcattgctgattggcttaaaggagctatgcacaagggtttcatccaggtcagtgaccatacagatccttccttgatttttctctgtcacctctgggagcaggcaggttcctgggatctgataaaactgatattggagacgctggagctgatccgacatagcaatggtgttgactccctccttatgtgtggattgctcagcgggggaacttgactgtccaacatgctgggtgcaagaacagcagaaaggggacttttaagatgtggcaaacatgaggcctcttcggagaggactttggaaaccaggccttgcttggtaaggaccagggcatcttccctccatgcctgggtgatgatggagccttgttccatctaacaatcctgagggctgggctggggggcatgggctggggcctgattcagttcccgagattctgacctccacagctgttcacataccccttctcctttccatactggtcgggaaggga

SEQ ID NO: 769 - DNA, 5834 bp, Homo sapiens
tttggcgggatctgtgtctctcgctggtgctggccaggagcttgggatctgtctcctctttcgcctcctgcaccttgagagccctgggtactctgtcacagcccctgttgccctgcgatctgtaggtccttggggagcatagttaaggtgccaggacatcctggaagctgggaaatggtgagtatacggggttcgccatcccgagaggggagagcagactgtgaaaccggcaggaccggcctccccacggttagctccgagtctcccgcagcttggccttcagtcccctgtggctgcaagatggccgctgggccagcagcgaggacccccacatccggcctggccatccggtcctgtccctgggcagcgccctgctctgcgcccacagccatgagtatttcccagattgttcagggaggccagatgggtcatcagggaaaaaccgcgagtgggtgtttgcgtgggaggagctgcggcccgtggggtccccagtctctcttgttaaaaattaacgggagtctatgttaaaaggttcatcagtttatctgaacaaacagtgattggtgaaatggaaagcacccagccatgatttctgggccaccagaggggcataaaggaaaggcttttataagatgcatgagaaagcagcccaaattcaagaattggttccagttatatggtagccttatttgaactatccagatggaaatgtcctggttacatattcagaggttaattgcatgtttgtcatgggttaaacctgcattttgcttcaggctaagatagtgttttataggaaatgtatttgagttaggttttagatttttttttttttttttttttttttaacctatgaacacagggcactagagccactttagactaattttctgatctttaattattttaacactccagaggaggactggttttctcctgtgattttttaatgtatggcaagtggaacctctaatcgaccaccctgtttttcatcctaactcaggcttgcagtaaaattatcagttcccactttctttgctgcattctcaaacgcaacacatgagaccagctttcccttgccaatttacaatgctgttaactatatgtcctttattatacatttcattaaagttttctattattgggtttctttctacttctccctacagttctggcaatatttgctttttatatttagaagcctcccttttgggtgcataaatatataaagctatattctcttgagaaattaacctctattattgtatggtaaactcatttcattcttgtgagagacattgctagaaagtctattttgtctaatttaagcattaccatttcactcctttggttattatttgcatggaatatcattttctatcctttcacttttagcctatgctcttaattcataattgagtctcttgtaagcagcatattatgaggtttaaaagattaatttatccactctgtctgctttagtctcttttggctgctataacagaatatcacacactggtaattaataaagaatagaattttatttgactcatgattctggaggctgggaagccaaaacaacattatactggtatatgttgaaggtctagttgctggataataacatacacaaagatgtgagggagagagagctttttttttttaatatataacagatccattcttgttataattagcccattcccataataagaacgttaatccattcatgagggcagagtgcttatagcttaattaatttttaaaggttccacctcttaattctaacatgttggctattaaattttatcctaaattttggagatgacattcagtgtacagcagtatctgtttagtagatactttaatctttttatttgtaaggtagtgataggtaagcagttactattgtacatttgtagttttctgtccattttaagtttgcttcttttttttctggttctgtctttcctgtggtattgttcatttttgttgagacaaagttatgctttcttgctcagactgaagtgcagtggcatatcacagctcactgtagccttaacctcctgggctcaaataatcgtcccaccttagccacccaagtagcttggactgcagacatgtaccacaacacccaaggagatttgattcttccaccttgacctcccaaagtgttggaattataagcaggagacaccatatccaatgtgtaatttttgttgtttgtgtatgctttaattactttctctttttctttactattttttttttcctactggttatcatgagacttatgtaaaacatcttgtattttaatagtctagtttaagatgataacaatttatagtattctgaaattcagtatgtatttaccattttagtgacatttatactttagtatttttcatattgttagttagcatttcatcatatcaatgtgaagatttcttccagaccatggctggagaaggaaagaaggtgtgttttgcctgattcagggactatagagagaaccaagttctgcaggcctgtcacctaagtctcaggtgagtatgaattctcttgtgttttccacagactgttgcagtgtcaggaccaaggtcaaatgagttatagccaagtctacagtaagatgtggcagtattctgttttgaagcgaggaccatgattggcaagcttgccacttggtcaagtgcttaccctctaaagatgtcttccttggtctttgcctccagctgggtgtcacaaactctgaactggattccaaggctttcatgaatgcacttatgtttgctgtggcagctgcattatgtcgtgggggatgtggatgcagaacctcccattctgtcgtcttgcttatgttactctcctttatgtttcactttctcaaatgaatgacaagcaggtgattttcagattcaaaagttctaaaataaattgctcaaatttacacattatgtaagctgttaataaaatttcttgtaggtgctacatatttattaaaatttttggttgtaattttaagctcactgtaggcagaaaggaatcattaagatttctattcttttttagtctgtatctaaatgaccatatattttaattccaaatatttactttatacttcagtaatgctcattgtattttgcaaaatttatattgttcttttatttgaaaatataaggctttttttagctcctgaaatctatattatagtcatatagttttattatagtatttgataagaagagcagcaacatattgagaacagaataaaattctgctgtctttttaatgattatttattaaattcttctcattaaagcctattattaatgattgtaatgtatttactgtataattttactgcaatttattaaatgccaatgacttctaatgtctgcttttcatgactgcacacagtttaaagctgtagatatctaaagggttatttttcagcccggcacggtggctcatgcctgtaatcccagcactttgggaggccaaggtgggtggatcacgaggtcaggagatcaagaccatcctggctaacacggtgaaacccagtctctactaaatatagaaaaaattagccgggcatagtggcgggtgcctgtattcccagctactcgagaggctgaggcaggagaatggcgtgaacccagtaggcggagcttgcagtgagccgagatggcaccactgcactccagcctgggcgacagggtgagactgtctcaaaaaaaaacaaaaagggcttatttttcattgtatatttatgttgtattcaggattttatgcattaaaatctctcttcttattttcagttctgtgttgttgtgtttcttttctgggggggtatgttttctcagagcagttaattgtatttttgcttttaaagcttgatatcatgagttgaatgataattttttaactcggtacacattatgacaatgtgatatttaatttatatttgaattagctgtgtttgttgcttatagatatatctatgtgtttttcacctatgtaagtatgtcatgtttttcatcttttttccttgtttttttttttttaagtttcagatatgctttctttttcttttttttgtttttttttttttaaagagaattttaaaacagagtcaaatgaacaaaaatcagttatttgtcctcttgcagggcggggagaccttccttccccacgggtttgaggctatggctaagtggtgagccttggtgagacgcagaaaggatccatcccaggcacttggctagaggtaagtaaaaatagcctttgggccagaagacctgatagtttgggtactcgtctggacataagtccccatcttcccagaaatgtcgtcttttgtctgcaacaactggctggagaaatatttcagaaagatgtgtgcctggaacacccaaaggcatacctttcctttctccttggcataggccttgcagcactgaagaaagaccaggtttgcaacggagccttcaatactcttcatccctatggatctcaggggctcatagggtgacaggagaggagacaagctagcttgggaagagtctttgtccttcagcttctcctctactgaaacactatatacttggggccacagttcatagcaaaacacacatgctgtctttctttctctcacacccccatctcgggaacccaacaacttgatggcaggtagctctgggtatccttggtctggcattcacccactgggcatctaagctgtcctaaagctcttttcaatcacttctcactgtttccaggcccatgtgggtaggtgttccagccttcactctttcaggctgttcataaaggcacagtgtgggaaaatcccctactgtgatggccattgctgggaagcagggaaggttaagggcccactgctgcccaaggctagtgtagacaccctctgctcctccactcatctcctcaaataatgatatcaggtgcagcagctgctgtctggaatgttatcaaaccaggactgcacaggcactgcattctctgtgtggaagatgtaagaagcaggcgagttgtccaggatgagttttcctcaggtccctccccagatggctgacgtccttgacatagcagccctggtgaaacaaacatgactcatgggacaggcagccccagaccatcccatacccgtccagctcacccgtcacaggatctgcctacttgttcaggctgggaagaagagagcaatgacgaaaacacatttaaacatttcctccattcatgtcaggaactcatccatataaggcctcatgagcacatggatctggtgcatggtcccctcaagctctacaggcactaggcagtcagcattgctgattggcttaaaggagctatgcacaagggtttcatccaggtcagtgaccatacagatccttccttgatttttctctgtcacctctgggagcaggcaggttcctgggatctgataaaactgatattggagacgctggagctgatccgacatagcaatggtgttgactccctccttatgtgtggattgctcagcgggggaacttgactgtccaacatgctgggtgcaagaacagcagaaaggggacttttaagatgtggcaaacatgaggcctcttcggagaggactttggaaaccaggccttgcttggtaaggaccagggcatcttccctccatgcctgggtgatgatggagccttgttccatctaacaatcctgagggctgggctggggggcatgggctggggcctgattcagttcccgagattctgacctccacagctgttcacataccccttctcctttccatactggccgggaaggga

SEQ ID NO: 770 - DNA, 1358 bp, Homo sapiens
aggttaattgcatgtttgccattggttaaacgtgcattttgtttcaggctaagataatggtttataggaaatgtatttgagttaggttttagttttttttttttttaacctatgaacccaggacactagagccactttagtctaattttctgctctttaattattttaacactccagagggtgactggttttctcctgtgtttttttaatatatggcaagtggaacctctaatcgaccaccctgtttttcagcctaactcaggcttgtggtaaaattatcagttcccactttctttgctgcattctcaaatgcaacacaggagaacagttttcccttgcaaattcacaaagctgttaactatttgtcctttattatacatttcattaaagttttctattattggatttctttctacttctccctacagttctgcccatatttgctttttatatttagaagcctcccttttgggtgcataaatatatatagctatattcacttgacaaattaacctctattattattgtatggtaaactcatttcatgcttgtgagagacattgctagaaagtctattttgtctaatttaagcataactaccattgaactcttttggctattatttgcatggaatatcattttctatcctttcactattagcctatgctcttaattcataattgagtctcttgtaagcagcatattacgaggtttaaaagtttcatttatccactctgtctgctttagtctcttttggctgttagaatatcacagactagtaattaataaggaacagaattttatttgactcatgattctggaggctgggaaggtaaaagaacatgttactggtatctgttgaaggtctagttgctggataataacatggccaaagatgtgagggagagagagctttttttttttaatatataacagatccattcttgttaaaattagcccattcccataataagaacattaatccattcatgagggcagagtgcttatagcttaattaatttttaaaggttccacctcttaattctatcacattggtcattttatcctaaattttggagatgacattcagtctacagaagtatctgtttagtagataatttaatctttttatttgtaaggtagtgataggtaagcagttactattgtacatttgtagttttctgtccattttaagtttgcttcttttttttctggttctgtctttcctgtggtattgttcatttttgttgagacaaagttatgctttcttgctcagactgaagttcagtggcatatcacagctcactgtagcctcaatctcctgggctcaagcaatcctccccccttagccacccaag

SEQ ID NO: 771 - DNA, 105 bp, Homo sapiens
ggagactaaggcaggagaatcacttgaacctgggtggcagatgttgcagtgagccgagatccttccactgcactccagcctgggtgacagagcatgactccatct

SEQ ID NO: 772 - DNA, 906 bp, Homo sapiens
gtcctcttgcagggtggggagacaacttccttccccacaggtttgaggctatgcctaagtggtgagtcttgaggagatgcagaaaggatccatcccaggcacttggctggacttaagtaagcatagcctttaggccacaagacctgatggtttgggtactggtctggacataagtccccatcttcccagaaatatcatcttttgtctgcaacaactggctggagaaatatttcagaaagatatgtgtctggaacacccaaagacatacttttcctttctccttggcataggccttgcagcactgaagaaagaccaggtttgcaatggagccttcaacagtcttcatccctatggaactcagggtctcatagggtgacaggagaggagacaaagctaacttgggaagagtctctgtccttcagcttctcccctactgaaacactatatattgggcccacagttcatcacaaaacacacatgctctctttctttctctcacacccacatcttgggaacccaaaaacttgatggcaggtagctctgggtatccttggtctggcattcacccactgggaatctaagctgtcctaaagctcttttcaatcacttctcactgtttccaggcccatgtgggtaggtgttccaggcttcattctttcaggctgatcataaaggcacagtgtgggaaaatcccctactgttatggccattgctgggaagcaggaaaggctaagggcccactgctgcccaaggctagtatagatgccctctgctccactcatgtcctcaaagactgatatcaggtgcagcagctgctgtctggaatgttatcaaaccaggactgcacaggcactgcattctctgtgtggaagacataagaagcaggcgagttgtccaggatgagag

SEQ ID NO: 773 - DNA, 541 bp, Homo sapiens
ttttttcaagttttattttaagttcaggggtccatatgtgataaagtttatttttcaacttctattttaagtttaggggtccatgtgcagactatgcaggtctcttacatacataaatgcgtaccactgtggtttactgcacagatcatctcatcacccaggtaccaagcccagcatccgcagctattcttcctgatgctctccttcccctcccccatgccatgaaacaggtgtccagtgtgtgttgttcttcctgatgtgtccatgtgttctcattgatctgcttctgctaataagttagaataataataggcggtgtttggttttctgttcctgcattagtttgctgggagtaatggcttcaaattccaaccatgtccctgcaagggacatcatctcattatattttatggcttcatagtgttccatggtgtatgtgtaccacatttcctttatccagtgtatcattgatgggcatgtagattgattacatgatgttgctattgtaaatagtgctgcaatgagcatttgtatacatgta

SEQ ID NO: 774 - DNA, 105 bp, Homo sapiens
ggaggctaaggcaggagaatcacttgaacctgggtggcagatgttgcagtgagccgagatacttccactgcactccagcctgggtgacagagcaagactccatct

SEQ ID NO: 775 - DNA, 564 bp, Homo sapiens
agagaatccaccagaaacacatttttttttcaagttttattttaagttcaggggtccatatgtgataaagtttatttttcaacttttattttaagtttaggggtccatgtgcagagtatgcaggtctcttacatacataaatgcgtaccactgtggtttactgcacagatcatctcatcacccaggtaccaagcccagcatccgcagctattcttcctgatgctctccttcccctcccccatgccatgaaacaggtgtccagtgtgtgttgttcttcctgatgtgtccatgtgttctcattgatctgcttctgctaataagttagaataataataggcggtgtttggttttctgttcctgcattagtttgctgggagtaatggcttcaaattccaagcgcatgcctgcaagggacatcatctcattacattttatggcttcatagtgttccatggtgtatggtaccacatttcctttatccagtgtatcattgatgggcatgtagattgattacatgatgttgctattgtaaatagtgctgcaatgaacatttgtatacatgta

SEQ ID NO: 776 - DNA, 105 bp, Homo sapiens; identical to SEQ ID NO: 771

SEQ ID NO: 777 - DNA, 430 bp, Homo sapiens
catgggctgaccttctggccgctggatacaggtatgctggttgtcgctgaggaagaagccttcccggcagtggcactcatagctgcccatcatgttgacacagctctgctgacagccgccgttgccctcggcacactcgtccacatctgtgcaggataggtagtcagtggggtcatggggtacaggcagggtccagggtatatcccaagacttcagcaccaaaggcagtcttaagaactactaccccctaagcccagccttaagccaggaagtcctcacacccttgtcagctaatatttcactaagtgtaaaaaggctgccctgagggcagagctgggaagctaagcaagtgggggaaaaggggacctttgaacctcaaatgtcacctaggtgaagccatgcctccctttccctcacctgtgtaaactgg

SEQ ID NO: 778 - DNA, 430 bp, Homo sapiens; identical to SEQ ID NO: 777

SEQ ID NO: 779 - DNA, 262 bp, Homo sapiens
gaacagtaggctctcacccccaaatcaccacccctaggttctagagccaagctcaccctggagcccccaattcaacaccttgattccatctctatgctagctactgccctcccaagtccatggcccttctcagtttgccttggcccaggaggcatcacgtagattggttgtcaaatggagcagctagaatctgggctcctgagggcttcatctgcccctctcttcccatcctctctgctgagatcctgcaaccttctcttcc

SEQ ID NO: 780 - DNA, 262 bp, Homo sapiens; identical to SEQ ID NO: 779

SEQ ID NO: 781 - DNA, 345 bp, Homo sapiens
tttaaccagcattcctctgcagcacactaaagttttggaagcaacagtctagactaaaatcctaattcctaaacctagcgttcgaggtcttgcaaagtttggctttccttactcctcaacaagtaccttcccctccagccaggctgaagggttccttaatgtgccttctagcttgtgtctgctcaggcctgcccttcactggcatctttcctatctctccttaatccacgtgatgccaactcagcttcaagacctaattcaagtcccatctgctcccagcagactttctgatcaccccagcctccctcccaggggttccttcctttctctgatttcattcaacat

SEQ ID NO: 782 - DNA, 4549 bp, Homo sapiens
ccattgagattgccaagaaccaacctcccatcctgaatcgcctggcaaaaatcttctacttcctgggaaagcaggatatggccattggaacctgcaacatggccctggatgtcctacgagatccagagctcaactggcaggcgtactgcacaagggccaaggtgggtcaacttcctgccccaccataccctgccattgggaatcagagaacaagggccagaggccaagaccctgttgccagggcccaagggtcaggcagtcctcatggtggaagggagcttaggagccatcaaaaaacacagttgggttctataaagtttttggtttgttttgagacagtgtctcgctctgtcacccaactggagtatggtggtgccaccacggctcactgcagcctagacctcctaagctcaagcaatcctcccgcctcagcctcccaaatagctgggactacaggtgcacaccaacacacccagctaattttggttttgttttgtagagacgaggtctcactatgttgcccagactcgtctcaaactcctgggctcaagcagtcctcccacctcgacctcccaaagtgctggaattccaggtgtgagccactacacccagccctgtaaggtttttgagtgaaagaatgcaggagcctccactcactgcaggaatcccttctacaattcctggtcagtgagcccccagcctcttctggattggcacgggtggaatcagactgaccagagttgaaatctggcttctccgccttgtggaacttgcagcaagccacttacccccacaaacttcagttcccaaatctgtaagatataaataacaacactttccttaaaatgttgtcaacagacacagtgaggtagcatctaaagcacagtgccttggacatagggggtgcttttctgaaagccagtagaggtcatttaatatagtggatcagagctctggctctgaacacagacagccttggttcaaatcccacaacaccacgtgctacgggacctttggcaaaatactcttgcccagattctgagcctcaatttctttatctgtagactggagttgttatgagaattacattagattttgtatgtaaaactcagcatcaagcacacagtaagatttcataagagactgactgctactaatttaatattaggcatatttttgaattatctcactgtctcttgatgcagtccactgcatagtcattcagctctgcaagttacacacttaggtgagttctgcctcctgctagcttcccgcactggtcccagacctgcctcctagagcccacacagagcccatgtgcttgaggaagccgactcggagctcccagtttacttcactgcaagccgaagagtcctcccatcccctcatcttctccactactatccacatgacctagtggcaaatctactcccagtcttggtctcagtggcttaattactttgccagcaggtacgaggcaggagtgaaattccttcactgtcgtggatgtggttattattctagataataatgacattaaccataatagtaaataataaaatatctctataaaattctgcatttcatcaagcactttcaagttcatggtctgatttaatgttcacaagaaccctctgagagaggccggacatgtccatcctacaaatgaggccacatagaaccagggaggcagggaacttccccaaggaactgcattcaataatcagaaactccaactttactctcctccctccatcaccatctggtgtcttatgatcctggcctctctgtggtgccagaggtcacacttactactcagatgactagaggagcacaggatggtggagaagagatgggaggaggagggaactcacattatctgtgtaaaagcctcagtccatgctgcggcccataagcgtggccctggcctcatgacctctctaccccacctccctctgctcatgcctctctcagtcttccaaccctactggcctgggcctctgcctggaatgctcttctcccagatatctgattggcttcctcccacacttcctacaggtcttctagtggccatctaattgaaaatatcaaagccatgccaacatttaatttgttaattaatttatttttaaaattattttagagataaggtctcactctgtcacccaggctggagtggagtggcatgatcacggcccactgcagccttgaactcctgggatcaagtgatcctcccacctcagcctcccaagtagctgggaccacaggtgtgcaccacaacacccgcccagctaattttttaaaaattatttgttgtagatacagggttctgcctatgttgcccaggctggtttcaaattcttgggctcaagcaatcctccagctgcagcctcccaaagtgctaggattataggtgtgagccaccacacctagcctccgccaacattttatgttttcctttcctggtttagttttcttcttagcactaatcactcccttacacactatttacatatttatcatgtttattttctctctcccccaaaacatataagctacttaatggcagggatttttgtggttttgttgtctactgtattctcagtgcctggaacagtgtctggcacagaggaggctcttaatgaatatttgctgaatgaataaatgaactgagcacctaccatatgctagctcctgactagaatatgttctttcagacatcatggtaattccccaaggaagatattcatgtactaagttttcagatatagaaatgaggttcaggttcatagagttgtggaactccctccagatgacatggctaatagctaggggttaagggaaggactggaattcaaaccctagtccaactgacccgaaagccagagattcatctccccctgcctccatgatgctgtcttataagcaaatcccttctgatgactataaagcattaataccttcaacaacaataaccccttttcccttgcttccttctacccaacccaaacccacccctcctaaacctccaaactttgtaaatgctctaagtgtggggaaaatggaggaattcaggaaagcaagggtttgagatcatttgtaatgtgatgcttggcagttggggccacctgccattcttcccaaactgcttgttgacatagactctcacaaaatcggtgctgccatcctacctaaaataatcctccccaatcacctctatcccattgccatatttattttgtcatagcacttaccacttgaaatagaactgtttactattgactgcctcccctactggaatgttaagttctgccagagcagggacctcatctatcttgttaccacggtacctcctgtacccagcataggaactggcacatggtgggcactcaatacatatctgctgaatgagtaagggactcttacttcatcctactcactcattgcacagacagggaaactaaggaccagaaagagggtatggctaacccaagttggtccaaggctaggacctaggactcctgggtcctggcctcagggtctttctactgcaacacataacctccctggttgctgttgaaaaaaagactgggttcatttagagcagagaggaaggcagaggcccttgcctggatcatctttcctaagctggctctctgttggcagatccacatcagagcctacctgcatgacctcaagcgggccaagatgggtctcgggggcatgcctgacaggaaccacctggcctgtgccaaggctgaccttgaggaagtggtcagggtgtgcccaggcttcaaggcgtacctggacatcggccaggtaaggcagtctcttggcttagccaatagctgagcaagaatctgtttactccttgccaggctagaccaagggctaggccaagatgcagaggaaaaagtttcactccctgataacagtacccatctcctccagccgtggtgaggactgaataagacgtgtgtacagtatttagaataaggcttggctcttcctaagcactcaggaagtgtgggcattattctttatctagaagatacctattctctatctgtgttcagggaatgtttaccaagaagtgacaatatcataattttaggtacaagaaaaccgagatccagagattgactcactcaaggttatatagctaggtgtgaaggggctggaactggaatcggggtactccttttctagaggagcaggaataaaacgtgtgattaataattgtcgatggagagagggtgggaatgagtgaaggagtggaatttttttttaaagcaagcgtggggcgggaatgagcgtggagccgcgcctgcggtgaagggctcaccccgcgtccccgaccccaggtctactactatatgggcgtggacgcggtgcaggagctgctggcggtggacgaggcggcgctgaaccaggcgctggtgttcctggccaaggcgggcgagtcggagctgggtgccacgctgcccgagctgcagctgctgcgcggcaagtgcctgcgcatcaagggcgaggacgccaacgcggccgc

SEQ ID NO: 783 - DNA, 6199 bp, Homo sapiens
ggagcagaagagactgcctgccttcaaccgcacgctggccctactccggcaagtgctgaagtccgaggacccccgccaccgaggtggggacccgggggatgggtgggacagcagcctctgccccctgccaacagcccgctggcattgcatccacctctggcattacctccccttcttggctcctgtttcttcctccttcgctctgtcccctacactcatctgtgcacctcaaggagcccacataccttgcccaagtgaacatgccaactacaagtcactgtgactgcaggcttgcccgtctgcagctcatgacctggagggtgagaggtagtttcccctatttccacctatttatggtcagaagattgaagcctctgttggagaggagtcgagtcatttttttgcagggccagacagcaagagcagggactagaaccaccagagctggtgagagctgaagtcagaagagacctacgtacctgaaatgaggtcccccgatgacacattgagcacagaataagcactaaaatgggttcactaacccctcacatggcccctctctccacctttgcttctctctgtccctgtgttgccctcagtgatcccactctactatcccttgctttgtcttcatgggtgacacctaggatggggatggccccttccctctctccaccctgctgcttcctagagaccctctcccacccttcacccccagccctggcctggtgctacctcgggatgctgctggagcggaaggacaccttctccaccacccccatgggcgtccatgactgcgggtactcagggaccgaccctctagactgcttcggcaaggtacttgcccccagccacacccaccctctaaactgagaaggagcctggcaccccagcctctccacctagaacccaggcttctctgggtatcaacccccaccgcgtggcccacccaggaagtacacttactccagaccttgctctccatcctctcttcattcaaaacaaaagagaccctccccatacccagtctggccccagcccatttctccagccttgaaatagacccttagactttttcccttgagaccttcattcacagtattccctctgccaggagttccctacctctccacccccagtggcatagtagaaagatgggtttagctggtgtctccttgccagccctgcccataggctgtgtgaccctaaggcaagtcacttacaacaggaagcagtcaatgacaatagtgggggtaagtgttattacccaggtagaaaccctgtactttgtaaggttgggggatgggggttgcctctggcccttcctctcacctgccctaggaagatgggagagcatacactgggaaggaggggtctgactgggctctggaaggctttactggatgtgaccggtgatgtggtcgtgggccaggctctcaggagttgagtgccaataggttgtgccccaaggtgttggggcttcgtgatgtgacaacttactggcaggtggataagggtggatatgggtaaagggcaccatgttgatacggctgtatccaaagatggggttcctgtggttcagcactgtttagccagctctggctaatgaccaagcaagtggtttgtttttgcactcctcccttacctaggccattgagattgccaagaaccaacctcccatcctgaatcgcctggcaaaaatcttctacttcctgggaaagcaggatatggccattggaacctgcaacatggccctggatgtcctacgagatccagagctcaactggcaggcgtactgcacaagggccaaggtgggtcaacttcctgccccaccataccctgccattgggaatcagagaacaagggccagaggccaagaccctgttgccagggcccaagggtcagggagtcctcatggtggaagggagcttaggagccatcaaaaaacacagttgggttctataaagttttttgtttgttttgagacagtgtctcgctctgtcacccaactggagtatggtggtgccaccacggctcactgcagcctagacctcctaagctcaagcaatcctcccgcctcagcctcccaaatagctgggactacaggtgcacaccaccacacccagctaatttttgttttgttttgtagagacgaggtctcactatgttgcccagactcgtctcaaactcctgggctcaagcagtcctcccacctcgacctcccaaagtgctggaattccaggtgtgagccactacacccagccctgtaaggtttttgagtgaaagaatgcaggagcctccactcactgcaggaatcccttctacaattcctggtcagtgagcccccagcctcttctggattggcacgggtggaatcagactgaccagagttgaaatctggcttctccgccttgtggaacttgcagcaagccacttacccccacaaacttcagttcccaaatctgtaagatataaataacaacactttccttaaaatgttgtcaacagacacagtgaggtagcatctaaagcacagtgccttggacatagggggtgcttttctgaaagccagtagaggtcatttaatatagtggatcagagctctggctctgaacacagacagccttggttcaaatcccacaacaccacgtgctacgggacctttggcaaaatactcttgcccagattctgagcctcaatttctttatctgtagactggagttgttatgagaattacattagattttgtatgtaaaactcagcatcaagcacacagtaagatttcataagagactgactgctactaatttaatattaggcatatttttgaattatctcactgtctcttgatgcagtccactgcatagtcattcagctctgcaagttacacacttaggtgagttctgcctcctgctagcttcccgcactggtcccagacctgcctcctagagcccacacagagcccatgtgcttgaggaagccgactcggagctcccagtttacttcactgcaagccgaagagtcctcccatcccctcatcttctccactactatccacatgacctagtggcaaatctactcccagtcttggtctcagtggcttaattactttgccagcaggtacgaggcaggagtgaaattccttcactgtcgtggatgtggttattattctagataataatgacattaaccataatagtaaataataaaatatctctataaaattctgcatttcatcaagcactttcaagttcatggtctgatttaatgttcacaagaaccctctgagagaggccggacatgtccatcctacaaatgaggccacatagaaccagggaggcagggaacttccccaaggaactgcattcaataatcagaaactccaactttactctcctccctccatcaccatctggtgtcttatgatcctggcctctctgtggtgccagaggtcacacttactactcagatgactagaggagcacaggatggtggagaagagatgggaggaggagggaactcacattatctgtgtaaaagcctcagtccatgctgcggcccataagcgtggccctggcctcatgacctctctaccccacctccctctgctcatgcctctctcagtcttccaaccctactggcctgggcctctgcctggaatgctcttctcccagatatctgattggcttcctcccacacttcctacaggtcttctagtggccatctaattgaaaatatcaaagccatgccaacatttaatttgttaattaatttatttttaaaattattttagagataaggtctcactctgtcacccaggctggagtggagtggcatgatcacggcccactgcagccttgaactcctgggatcaagtgatcctcccacctcagcctcccaagtagctgggaccacaggtgtgcaccacaacacccgcccagctaattttttaaaaattatttgttgtagatacagggttctgcctatgttgcccaggctggtttcaaattcttgggctcaagcaatcctccagctgcagcctcccaaagtgctaggattataggtgtgagccaccacacctagcctccgccaacattttatgttttcctttcctggtttagttttcttcttagcactaatcactcccttacatactatttacatatttatcatgtttattttctctctcccccaaaacatataagctacttaatggcagggatttttgtggttttgttgtctactgtattctcagtgcctggaacagtgtctggcacagaggaggctcttaatgaatatttgctgaatgaataaatgaactgagcacctaccatatgctagctcctgactagaatatgttctttcagacatcatggtaattccccaaggaagatattcatgtactaagttttcagatatagaaatgaggttcaggttcatagagttgtggaactccctccagatgacatggctaatagctaggggttaagggaaggactggaattcaaaccctagtccaactgacccgaaagccagagattcatctccccctgcctccatgatgctgtcttataagcaaatcccttctgatgactataaagcattaataccttcaacaacaataaccccttttcccttgcttccttctacccaacccaaacccacccctcctaaacctccaaactttgtaaatgctctaagtgtggggaaaatggaggaattcaggaaagcaagggtttgagatcatttgtaatgtgatgcttggcagttggggccacctgccattcttcccaaactgcttgttgacatagactctcacaaaatcggtgctgccatcctacctaaaataatcctccccaatcacctctatcccattgccatatttattttgtcatagcacttaccacttgaaatagaactgtttactattgactgcctcccctactggaatgttaagttctgccagagcagggacctcatctatcttgttaccacggtacctcctgtacccagcataggaactggcacatggtgggcactcaatacatatctgctgaatgagtaagggactcttacttcatcctactcactcattgcacagacagggaaactaaggaccagaaagagggtatggctaacccaagttggtccaaggctaggacctaggactcctgggtcctggcctcagggtctttctactgcaacacataacctccctggttgctgttgaaaaaaagactgggttcatttagagcagagaggaaggcagaggcccttgcctgaatcatctttcctaagctggctctctgttggcagatccacatcagagcctacctgcatgacctcaagcgggccaagatgggtctcgggggcatgcctgacaggaaccacctggcctgtgccaaggctgaccttgaggaagtggtcagggtgtgcccaggcttcaaggcgtacctggacatcggccaggtaaggcagtctcttggcttagccaatagctgagcaagaatctgtttactccttgccaggctagaccaagggctaggccaagatgcagaggaaaaagtttcactccctgataacagtacccatctcctccagccgtggtgaggactgaataagacgtgtgtacagtatttagaataaggcttggctcttcctaagcactcaggaagtgtgggcattattctttatctagaagatacctattctctatctgtgttcagggaatgtttaccaagaagtgacaatatcataattttaggtacaagaaaaccgagatccagagattgactcactcaaggttatatagctaggtgtgaaggggctggaactggaatcggggtactccttttctagaggagcaggaataaaacgtgtgattaataattgtcgatggagagagggtgggaatgagtgaaggagtggaatttttttttaaagcaagcgtggggcgggaatgagcgtggagccgcgcctgcggtgaagggctcaccccgcgtccccgaccccaggtctactactatatgggcgtggacgcggtgcaggagctgctggcggtggacgaggcggcgctgaaccaggcgctggtgttcctggccaaggcgggcgagtcggagctgggtgccacgctgcccgagctgcagctgctgcgcggcaagtgcctgcgcatcaagggcgaggacgccaacgcggccgc

SEQ ID NO: 784 - DNA, 506 bp, Homo sapiens
cgcgcagtggagctggacgacgcgggctccagccacaccgacggcttcggctgcctgctcgaggcgctgctggcgcagtggagccaggcacagctgagcgacggggagctgggccgcgaggtggacgcctggctgcgccgcgcccaggacaagtaccccgcggcgcgcctgcgccaggagctgcagcgcgtgtggcgcgggcacacggacgaggtgttggggctggcccgggccctggtggcccagggacggccggcgctggtgcggctgctcttcgagaccatggagcgcgagggcgagggcgccagcgcgccgcgggaccgccgggctgtctcattctagggctcaggtgcccaggccggaggctccctgggaccccgcccaggccccgcccagctgatgggaccaggtccggatggactccctgccttaggctgacctgggagcggagccagttcgattcttggtcgggaattgtgaatggggatgttgcgacacccgcgcgg

SEQ ID NO: 785 - DNA, 1876 bp, Homo sapiens
cgcgcagtggagctggacgacgcgggctccagccacaccgacggcttcggctgcctgctcgaggcgctgctggcgcagtggagccaggcacagctgagcgacggggagctgggccgcgaggtggacgcctggctgcgccgcgcccaggacaagtaccccgcggcgcgcctgcgccaggagctgcagcgcgtgtggcgcgggcacacggacgaggtgttggggctggcccgggccctggtggcccagggacggccggcgctggtgcggctgctcttcgagaccatggagcgcgagggcgagggcgccagcgcgccgcgggaccgccgggctgtctcattctagggctcaggtgcccaggccggaggctccctgggaccccgcccaggccccgcccagctgatgggaccaggtccggatggactccctgccttaggctgacctgggagcggagccagttcgattcttggtcgggaattgtgaatggggatgttgcgacacccgcgcggtttgaaacgcccacccagactggaaggcctgattcccgagagcagaagaggctgggagcagaggtgagaaaacactgggaagctgccaattaagggacagaattttctagacatacaggtaaaataagatggttgtgaggcttctgagagaaacagaagacagctacctcagtgtggcagttttctagtccgggcgctcaatccctcaggcctgagtgcctgtctttgggctccggtaggccacactctatccttatgagaaagccccgtttactttagttgactggagtgtggtctcagctcctgcagccagaaaagccctgactaaagcagagggcagggtggcacggcgagtgagttacgggacagggccctagcctaagcctcgtgctcagggctcattcctgcctctctgctacttttctagtaggcctccttcttggtccgcttggcccaaaaggcctcccaaatgctctgaaatagagctcatcaatagaaccttcacttgatttccctcttcttgggggaaactaagggcgccacccattaggaggtgccacctgcccccccccttttttttttttttttttgagagggagtttcgctcttgttgcccatgctggagtgcaatggcacgatcttggcccactgcaacctccatctcctgggttcaagcgatcttcccgcctcagccttccaagtagctgggattacagacgtgtgccatcaggcctggctaattttgtatttttagtagagacagggtttcgccatgttggtcaggatggtctcgaactcctgacctcaactgatccacccgcctcagcctcccaaagtgctaggattacaggtgtgagccactgcacccggccctgcccccagtcttgaccattctactaattttaaagaacatcttggaattttacactcttggaatcatagtcgtagaatcctttttttgagacagagtctcactctgtcgcccaggctggagtgcagtggccagatctcagctcactgaaacctcagcctcccaagttcaagtgattctcgtacctcagcctcctgagtagctggaattccaggctgtactcactgctttgctcatatcctcgctcattaccagggacaggccagcacccctgcattgcatctcacatatccactgatggatggagaacagactgaaattcagtgccttagagaccacacactccaaccccctcattgtgcagatgggaaaactgagagccatagaagggaagtggcttgcccaaagccacacttactgttttccccacactgtaccacaaactttcaccattcttcaggtttggaaaaatactaataaactgatcaacactaaagta

SEQ ID NO: 786 - DNA, 433 bp, Homo sapiens
cttgcataacacaggggttggggcgccgatccccgacgcagtcgaaaatctacatatcacttctgactcttccaaaacttaatagccggctgttggctgaaagcctcactgataacataaatagtccattaacacatattttgtatgttatatgtattatatacctgcaataaagtgagctggaaaaaacaaaatgttattaagaaaatcataagagaaaatacatttcctaagtgagagtggatcatcataaagggcttcatcctcacggtattcacattgagcagactgaggaggaggaagaagagggattggtcttgctgtctcaggggtggcagaggcagaaggggtggaggaggtggaagggaggcagaagaggcaggtacactcagtgtaacttctatcgagaaaaaaatccacgtatatgtggacc

SEQ ID NO: 787 - DNA, 433 bp, Homo sapiens; identical to SEQ ID NO: 786

SEQ ID NO: 788 - DNA, 623 bp, Homo sapiens
cccccaaacatagcctaaaaagacaatgactctcattccagtagcagaggttcactgttactaaatgaagccacaggttccactgtgggctagctgtatctggaagaaaattcttgttttgagcccaaatctctttctctataatttcttttagttctgcttttgctagaataacaaatgtctttcagatatctaaatgcagcttttgtgtctccccttgtttttctcttctccaggctaacctttctctgttccttcaaccactggttacaagacagtctctgacaccctctccattcctcatgctgtgttcataaagcactcaagtttgtttgttttccttttctttcctttgttttttgtttgtttttttggggggaagtcagagtcttgctctgtcacccatgctgcagtgcaatgacatgatcatagctcactgcagcctccaactcctggtctcaagcaatcccaccgtcttggctgcccaaagcattggaattacaggcaagagccaccacgtccagtttatgttccttttcaaatgtactggtataatactcctaatgtgatctaagtactgcagagtctaatgaaatcatgactcttccttctgtgggcatgag

SEQ ID NO: 789 - DNA, 623 bp, Homo sapiens; identical to SEQ ID NO: 788

SEQ ID NO: 790 - DNA, 3644 bp, Homo sapiens
tttttttttcacaacaactccctgactaattcctacaacacaactctagcacagcgaaggtggcacttgccacccttgggggctttggccacacacacacacgacacggaatatactgagagctgcttttatatattaatgaggtcaaagctgcttgctaattagttagcagggcagtctcctagtctgcagctaagtcacagacattctccctgacctgaggcctggcaccgctgccctctctgaggagcagaccagagcggttcaggaagggagagtaaacatcgccacacttgccactacatctacgcccccttgggtctcagaaatggaaagtcaaattccaaacacactatccctacaccttgaactttcttcctcagacatctccaaccggtcgctctgcgaaaccagcagcattggacaggtggtcggccgaggagaatcagaggaaaacagcctcctcatttctgtgatcttcctatgacagctggaatgtacctaaaacacctaaccttcttcaccagccctgatctagttttagttatcagtggcgtatctatgactcggtatacaatttaaagcccactgataggaagctaaacacaggcacacatttctaatggacgattctatgaaaagaccacttaacagacacaactcccttttattgacattaaggccaaggttgtttctttttttgttatttttgtttaatatttcttcaaattttgtcaattgctgaagcccaggctgagcttctgtggcacatgacgattctctgaatttttgaaaagaacacatgtacctaaagttcaaaatcgaccagtgacacagatcttggggatctgggaggaggagaccccacagacacttccaagcactgccgggagattcgtttcgcctctcagacctgcctgccttgctcatcagcatgcagtcagagtgccaggggagggcacagccagcggcaacgcttcctggtgctccaggggctgccctcaggaggaggcctgccactcagtctgtgaagcaggattcttccatcaaaagaagccaaaccaaagagctcctggaacactcaggaccaaggcagatgagaagcctctaattaattttgtggccttttttggtttgttggtttaaaaaaaaaaagttggggggagggagagagagagaagagtaaaaggaaagtgcagggaaatttactctttcgcctcagccagtttattgttcatctctttgctttgctccttgtcgtctggcttggtggtacttgggccctccgcgctctttttcttggcagcctggcctgacaccgcctgcttgtctttggccttcctcgtgggcttatggctcgctgaggtcttttttggtttggaactctgaacactaggtttttccacctgtacggagagacagaccgcaaatacagaaacacaaaaaggtggggcgtgggaaggaatttagagagaaaagatatggttaattaaggaatgacggtaatgacagaggttggctcaggtggaacacagtgcataaggtgttcccaaggacattagggcattcggcatctcccgtctgaactccctgttccgtcactttggcagcacccactggccacgtggtctcccttgtcctgccagccttccaccgaccaccccaggcagtgggccataccactgttgggcaatatttgagcccctccctgtaggaagttaacacctcatcacgttgctcaactcacccacaggcataggattttgctttagtcaatgaaatgtgagcagtgacttgggtcaccttcaggcggaaaattcgagagtcagcctgtgctgcccagtgctctcttttcctctgccacagagacaggctgctctgccacccaagacccagatggagaggcaacgagggttagagtggcagccaacccacaatggatattaatgagaaataaacctttgttgatgtaagatgcagatgttctggggcggtgggtcgctgcagcacccgctggcttcccctgttctgtctctaggctggctcacccatatggagaagcatcctcgctgagatgctttgggcaggggggcatctccagtctcagctaggctttccgctgccagcactctgctcctcctctctgcctggctcctccaccattttccccagagcagctgttctaagctcactccactctccccaacctccctcctctagctctgtccccttcatctggagaagatggccttgcctgctctttctcaggaaacttcggagtcactgaaagtgacccctcaataggccacccccctcatctatctctagatttagtttccctcattttccctccttccttctctacgtcctcttttgtccaatgctaaccccatgccccgggtgccacaccatctctggatggacagagctgatgctgggccttgcaggctggatcattcactcactgaggtgcagcggctttcagtcactcctgacctgtaaggaaaggaaccaatcgtcctggtttgcctggaactgagaggtttcctggaacacagaactttcagtgctaaaatggaagaatcccaggcaaactgggtcggttagttaccttacccataaactggtcctgggccaaataggaaactccactgaagtgcaagactttaggacaaaagcagagaaaaggataattaggttccagagttatttaagttctcaggcattttctgctattatagagaggacagtggatatttgtacaattccatggggcctgacatcagaagatgctagattgcatggcttatatgattcctgcttcaccagctatatctccaacatgcttctcctgatcacgaactcctatgtaaggtggaggaatgttaccttaggaaaatccttgagtccactttcacaaactgttcattttggtaacaaatgctgggaacatatattatagctgatgtgacaggtgtgttgtgacagaccgagaagtcatagtggatggtgtttagcccgagaagatgagagagggcaggtgcttttcagggactagggagggaagaaagggtccagtgattggagccaaggatgaggcaaggcagggtctggtgggaggggagccgggcatgggggcctacaatactgggccagcccttctggggcccaagcacatctattttaagacaaggggatttagggctcaggtgaggttttctgccattgtttatctggatttctcaaaatcagaagctaattccctggaaatctgccagcctttaagctgtctttattttaggtgatgttcctctttaatattccctttgagtttaacaaaggttcctattgaagatggccctgggtctcagtgtgctttagaggaagcagggattttaaaggtgcccgtggaggctgggccagatttgacagcagcccaccccatgctctgctgcagttaacccttatggtccaggctgtgctgatgggttcccacaaggtctgtctcacctttgggggttccttgaagggttcgctgtagaggctgcgtattcttctgcgatcaatgaccttattgtcagctgttgttggcttgctggcctctcctttgaactgagcactgtagctggtctcatgaaccatct

SEQ ID NO: 791 - DNA, 3645 bp, Homo sapiens
tttttttttcacaacaactccctgactaattcctacaacacaactctagcacagcgaaggtggcacttgccacccttgggggctttggccacacacacacacgacacggaatatactgagagctgcttttatatattaatgaggtcaaagctgcttgctaattagttagcagggcagtctcctagtctgcagctaagtcacagacattctccctgacctgaggcctggcaccgctgccctctctgaggagcagaccagagcggttcaggaagggagagtaaacatcgccacacttgccactacatctacgcccccttgggtctcagaaatggaaagtcaaattccaaacacactatccctacaccttgaactttcttcctcagacatctccaaccggtcgctctgcgaaaccagcagcattggacaggtggtcggccgaggagaatcagaggaaaacagcctcctcatttctgtgatcttcctatgacagctggaatgtacctaaaacacctaaccttcttcaccagccctgatctagttttagttatcagtggcgtatctatgactcggtatacaatttaaagcccactgataggaagctaaacacaggcacacatttctaatggacgattctatgaaaagaccacttaacagacacaactcccttttattgacattaaggccaaggttgtttctttttttgttatttttgtttaatatttcttcaaattttgtcaattgctgaagcccaggctgagcttctgtggcacatgacgattctctgaatttttgaaaagaacacatgtacctaaagttcaaaatcgaccagtgacacagatcttggggatctgggaggaggagaccccacagacacttccaagcactgccgggagattcgtttcgcctctcagacctgcctgccttgctcatcagcatgcagtcagagtgccaggggagggcacagccagcggcaacgcttcctggtgctccaggggctgccctcaggaggaggcctgccactcagtctgtgaagcaggattcttccatcaaaagaagccaaaccaaagagctcctggaacactcaggaccaaggcagatgagaagcctctaattaattttgtggccttttttggtttgttggtttaaaaaaaaaaagttggggggagggagagagagagaagagtaaaaggaaagtgcagggaaatttactctttcgcctcagccagtttattgttcatctctttgctttgctccttgtcgtctggcttggtggtactcgggccctccgcgctctttttcttggcagcctggcctgacaccgcctgcttgtctttggccttcctcgtgggcttatggctcgctgaggtcttttttggtttggaactctgaacactaggtttttccacctgtacggagagacagaccgcaaatacagaaacacaaaaaggtggggcgtgggaaggaatttagagagaaaagatatggttaattaaggaatgacggtaatgacagaggttggctcaggtggagcacagtgcataaggtgttcccaaggacattagggcattcggcatctcccgtctgaactccctgttccgtcactttggcagcacccactggccacgtggtctcccttgtcctgccagccttccaccgaccaccccaggcagtgggccataccactgttgggcaatatttgagcccctccctgtaggaagttaacacctcatcacgttgctcaactcacccacaggcataggattttgctttagtcaatgaaatgtgagcagtgacttgggtcaccttcaggcggaaaattcgagagtcagcctgtgctgcccagtgctctcttttcctctgccacagagacaggctgctctgccacccaagacccagatggagaggcaacgagggttagagtggcagccaacccacaatggatattaatgagaaataaacctttgttgatgtaagatgcagatgttctggggcggtgggtcgctgcagcacccgctggcttcccctgttctgtctctaggctggctcacccatatggagaagcatcctcgctgagatgctttgggcaggggggcatctccagtctcagctaggctttccgctgccagcactctgctcctcctctctgcctggctcctccaccattttccccagagcagctgttctaagctcactccactctccccaacctccctcctctagctctgtccccttcatctggagaagatggccttgcctgctctttctcaggaaacttcggagtcactgaaagtgacccctcaataggccacccccctcatctatctctagatttagtttccctcattttccctccttccttctctacgtcctcttttgtccaatgctaaccccatgccccgggtgccacaccatctctggatggacagagctgatgctgggccttgcaggctggatcattcactcactgaggtgcagcggctttcagtcactcctgacctgtaaggaaaggaaccaatcgtcctggtttgcctggaactgagaggtttcctggaacacagaactttcagtgctaaaatggaagaatcccaggcaaactgggtcggttagttaccttacccataaactggtcctgggccaaataggaaactccactgaagtgcaagactttaggacaaaagcagagaaaaggataattaggttccagagttatttaagttctcaggcattttctgctattatagagaggacagtggatatttgtacaattccatggggcctgacatcagaagatgctagattgcatggcttatatgattcctgcttcaccagctatatctccaacatgcttctcctgatcacgaactcctatgtaaggtggaggaatgttaccttaggaaaatccttgagtccactttcacaaactgttcattttggtaacaaatgctgggaacatatattatagctgatgtgacaggtgtgttgtgacagaccgagaagtcatagtggatggtgtttagcccgagaagatgagagagggcagggtgcttttcagggactagggagggaagaaagggtccagtgattggagccaaggatgaggcaaggcagggtctggtgggaggggagccgggcatgggggcctacaatactgggccagcccttctggggcccaagcacatctattttaagacaaggggatttagggctcaggtgaggttttctgccattgtttatctggatttctcaaaatcagaagctaattccctggaaatctgccagcctttaagctgtctttattttaggtgatgttcctctttaatattccctttgagtttaacaaaggttcctattgaagatggccctgggtctcagtgtgctttagaggaagcagggattttaaaggtgcccgtggaggctgggccagatttgacagcagcccaccccatgctctgctgcagttaacccttatggtccaggctgtgctgatgggttcccacaaggtctgtctcacctttgggggttccttgaagggttcgctgtagaggctgcgtattcttctgcgatcaatgaccttattgtcagctgttgttggcttgctggcctctcctttgaactgagcactgtagctggtctcatgaaccatct

SEQ ID NO: 792 - DNA, 3644 bp, Homo sapiens
tttttttttcacaacaactccctgactaattcctacaacacaactctagcacagcgaaggtggcacttgccacccttgggggctttggccacacacacacacgacacggaatatactgagagctgcttttatatattaatgaggtcaaagctgcttgctaattagttagcagggcagtctcctagtctgcagctaagtcacagacattctccctgacctgaggcctggcaccgctgccctctctgaggagcagaccagagcggttcaggaagggagagtaaacatcgccacacttgccactacatctacgcccccttgggtctcagaaatggaaagtcaaattccaaacacactatccctacaccttgaactttcttcctcagacatctccaaccggtcgctctgcgaaaccagcagcattggacaggtggtcggccgaggagaatcagaggaaaacagcctcctcatttctgtgatcttcctatgacagctggaatgtacctaaaacacctaaccttcttcaccagccctgatctagttttagttatcagtggcgtatctatgactcggtatacaatttaaagcccactgataggaagctaaacacaggcacacatttctaatggacgattctatgaaaagaccacttaacagacacaactcccttttattgacattaaggccaaggttgtttctttttttgttatttttgtttaatatttcttcaaattttgtcaattgctgaagcccaggctgagcttctgtggcacatgacgattctctgaatttttgaaaagaacacatgtacctaaagttcaaaatcgaccagtgacacagatcttggggatctgggaggaggagaccccacagacacttccaagcactgccgggagattcgtttcgcctctcagacctgcctgccttgctcatcagcatgcagtcagagtgccaggggagggcacagccagcggcaacgcttcctggtgctccaggggctgccctcaggaggaggcctgccactcagtctgtgaagcaggattcttccatcaaaagaagccaaaccaaagagctcctggaacactcaggaccaaggcagatgagaagcctctaattaattttgtggccttttttggtttgttggtttaaaaaaaaaaagttggggggagggagagagagagaagagtaaaaggaaagtgcagggaaatttactctttcgcctcagccagtttattgttcatctctttgctttgctccttgtcgtctggcttggtggtactcgggccctccgcgctctttttcttggcagcctggcctgacaccgcctgcttgtctttggccttcctcgtgggcttatggctcgctgaggtcttttttggtttggaactctgaacactaggtttttccacctgtacggagagacagaccgcaaatacagaaacacaaaaaggtggggcgtgggaaggaatttagagagaaaagatatggttaattaaggaatgacggtaatgacagaggttggctcaggtggagcacagtgcataaggtgttcccaaggacattagggcattcggcatctcccgtctgaactccctgttccgtcactttggcagcacccactggccacgtggtctcccttgtcctgccagccttccaccgaccaccccaggcagtgggccataccactgttgggcaatatttgagcccctccctgtaggaagttaacacctcatcacgttgctcaactcacccacaggcataggattttgctttagtcaatgaaatgtgagcagtgacttgggtcaccttcaggcggaaaatttgagagtcagcctgtgctgcccagtgctctcttttcctctgccacagagacaggctgctctgccacccaagacccagatggagaggcaacgagggttagagtggcagccaacccacaatggatattaatgagaaataaacctttgttgatgtaagatgcagatgttctggggcggtgggtcgctgcagcacccgctggcttcccctgttctgtctctaggctggctcacccatatggagaagcatcctcgctgagatgctttgggcaggggggcatctccagtctcagctaggctttccactgccagcactctgctcctcctctctgcctggctcctccaccattttccccagagcagctgttctaagctcactccactctccccaacctccctcctctagctctgtccccttcatctggagaagatggccttgcctgctctttctcaggaaacttcggagtcactgaaagtgacccctcaataggccacccccctcatctatctctagatttagtttccctcattttccctccttccttctctacgtcctcttttgtccaatgctaaccccatgccccgggtgccacaccatctctggatggacagagctgatgctgggccttgcaggctggatcattcactcactgaggtgcagcggctttcagtcactcctgacctgtaaggaaaggaaccaatcgtcctggtttgcctggaactgagaggtttcctggaacacagaactttcagtgctaaaatggaagaatcccaggcaaactgggtcggttagttaccttacccataaactggtcctgggccaaataggaaactccactgaagtgcaagactttaggacaaaagcagagaaaaggataattaggttccagagttatttaagttctcaggcattttctgctattatagagaggacagtggatatttgtacaattccatggggcctgacatcagaagatgctagattgcatggcttatatgattcctgcttcaccagctatatctccaacatgcttctcctgatcacgaactcctatgtaaggtggaggaatgttaccttaggaaaatccttgagtccactttcacaaactgttcattttggtaacaaatgctgggaacatatattatagctgatgtgacaggtgtgttgtgacagaccgagaagtcatagtggatggtgtttagcccgagaagatgagagagggcaggtgcttttcagggactagggagggaagaaagggtccagtgattggagccaaggatgaggcaaggcagggtctggtgggaggggagccgggcatgggggcctacaatactgggccagcccttctggggcccaagcacatctattttaagacaaggggatttagggctcaggtgaggttttctgccattgtttatctggatttctcaaaatcagaagctaattccctggaaatctgccagcctttaagctgtctttattttaggtgatgttcctctttaatattccctttgagtttaacaaaggttcctattgaagatggccctgggtctcagtgtgctttagaggaagcagggattttaaaggtgcccgtggaggctgggccagatttgacagcagcccaccccatgctctgctgcagttaacccttatggtccaggctgtgctgatgggttcccacaaggtctgtctcacctttgggggttccttgaagggttcgctgtagaggctgcgtattcttctgcgatcaatgaccttattgtcagctgttgttggcttgctggcctctcctttgaactgagcactgtagctggtctcatgaaccatct

SEQ ID NO: 793 - DNA, 386 bp, Homo sapiens
aggatccactctagtcatttcctgatagctttcaaaatctgtgactcataaacacggagacccaccagcattttctaccttccttcatacttctccttcctcacagttttaaaccctgagatagaaaggaaggtcgcagtgggcctgatcaacaacttcgtttctgatattcctgttctgttaataattatggctcatgtagcacacgccgaattaatttacaaaagacttctcactcagccccaaggtgacaaccaaaatgatgtaagcagagactttgctgcctgaatggtcggagtaagagagagttcgtggaggctccacttcctccaaaccagaaggacctaaagggactttgaggtaaggaactgtgagaccctcactct

SEQ ID NO: 794 - DNA, 386 bp, Homo sapiens; identical to SEQ ID NO: 793

SEQ ID NO: 795 - DNA, 386 bp, Homo sapiens; identical to SEQ ID NO: 793

SEQ ID NO: 796 - DNA, 1387 bp, Homo sapiens
ggtccttgctgcaactgcaagccactgaagacaggtgtgtctgatcccaacgtggagcccacagtaacagcaagcagcgactgttgcttgtgcaggaggccctgtgtgccacatgttgctcttcactactgatcagggctgtttacgtgggtcccatcacagctgctctgtgactagggaacttgacgtctccatttttcaactgaaaacacagaagtacaaaggggttcaccaccttgtccacggttgccctgcttctaactggtcatgttggaataaaaacaagcaactgtcatccgggatattaaccacgcaggctgtggtgttgcaaagcaggggagcacggagcagggagcataccaccctgctgagatcagctcactcacaagtggcagggctagggctgcagtgcagctcacttacgggcactgtgtaagcctgaaagcaaagtccacatccaaaggtcgtagtggccccaaaacagcttcctgacctgcttctgtggtcccagacctcttgctgctgaggtaccttagctttccaattactcttgccaattctgcctgcccagtactgctaaaaggccacttccctccgtcccatggcctcaaacacacttcagagagaatttctgggcactttcagaaggctggtcactacagcacaaaagaagtcaaagttatcgcgttagtgctcccaaatctgaggcacagtttggagatgggggctctgagtcaaggggcaggctggggactgttccggtgcctgtgactatgggactgagtcagtcacagcccctctcattttcaccagtgaaggacataatgtatacagtgttgcatttccaagacaaagtgccttaaattggcttaggtcagcagactacagaagaaacaggatattccaggcccctgcttggatagctgatgcctgcttgtaggcctccccctttccccgcttaccccccattagttgccttcaccagaaccgaagaagtttagtctaaaatgaaagcttactactagcctgcaaaatagctccctttgtctgttcttatcagccagcccagctacttaggtcgtaagtgaaatacttgaagagcccctgagctgactaggattgcaatgcattgtgggctgtgacaaaatgcagcaagacaaccctaaaaacaaacaaacaaacaaaaacacctaaagcccctgcctaacaatcaataggtgacgtccaggaaggttgtgaccccatagtactcagcctgtgggaaactgggggaggagcctgcacactagtggacaaattgcttgttgaaactgctgggtgtgcctgtccgtcagacacccgattttgcaagactgactgtttattaaaaatctcactttcgctgttc

SEQ ID NO: 797 - DNA, 1387 bp, Homo sapiens
ggtccttgctgcaactgcaagccactgaagacaggtgtgtctgatcccaacgtggagcccacagtaacagcaagcagcgactgttgcttgtgcaggaggccctgtgtgccacatgttgctcttcactactgatcagggctgtttacgtgggtcccatcacagctgctctgtgactagggaacttgacgtctccatttttcaactgaaaacacagaagtacaaaggggttcaccaccttgtccacggttgccctgcttctaactggtcatgttggaataaaaacaagcaactgtcatccgggatattaaccacgcaggctgtggtgttgcaaagcaggggagcacggagcagggagcataccaccctgctgagatcagctcactcacaagtggcagggctagggctgcagtgcagctcacttacgggcactgtgtaagcctgaaagcaaagtccacatccaaaggtcgtagtggccccaaaacagcttcctgacctgcttctgtggtcccagacctcttgctgctgaggtaccttagctttccaattactcttgccaattctgcctgcccagtactgctaaaaggccacttccctccgtcccatggcctcaaacacacttcagagagaatttctgggcactttcagaaggctggtcactacagcacaaaagaagtcaaagttatcgcgttagtgctcccaaatctgaggcacagtttggagatgggggctctgagtcaaggggcaggctggggactgttccggtgcctgtgactatgggactgagtcagtcacagcccctctcattttcaccagtgaaggacataatgtatacagtgttgcatttccaagacaaagtgccttaaattggcttaggtcagcagactacagaagaaacaggatattcgaggcccctgcttggatagctgatgcctgcttgtaggcctccccctttccccgcttaccccccattagttgccttcaccagaaccgaagaagtttagtctaaaatgaaagcttactactagcctgcaaaatagctccctttgtctgttcttatcagccagcccagctacttaggtcgtaagtgaaatacttgaagagcccctgagctgactaggattgcaatgcattgtgggctgtgacaaaatgcagcaagacaaccctaaaaacaaacaaacaaacaaaaacacctaaagcccctgcctaacaatcaataggtgacgtccaggaaggttgtgaccccatagtactcagcctgtgggaaactgggggaggagcctgcacactagtggacaaattgcttgttgaaactgctgggtgtgcctgtccgtcagacacccgattttgcaagactgactgtttattaaaaatctcactttcgctgttc

SEQ ID NO: 798 - DNA, 1387 bp, Homo sapiens; identical to SEQ ID NO: 797

SEQ ID NO: 799 - DNA, 295 bp, Homo sapiens
cttttttttttttgagacggggtctcactctgtcgcccaggctggagtgcagtggtgcgatctcggctcactgcaagctccgcctcctgggttcacgccattctcctgcctcagcctcccgagtagctgggactacaggcacctgccactgcgcccggctacttttttttgtatgttttttttagtagagatggggtttcaccatattagccaggatgctcttgaactcctgacctcatgatccgcccgcctcggcctcccaaagtgctgggattacaggcgtgagccaccgcgc

SEQ ID NO: 800 - DNA, 294 bp, Homo sapiens
ttttttttttttgagacggggtctcactctgtcgcccaggctggagtgcagtggtgcgatctcggctcactgcaagctccgcctcctgggttcacgccattctcctgcctcagcctcccgagtagctgggactacaggcacctgccactgcgcccggctacttttttttgtatgttttttttagtagagatggggtttcaccatattagccaggatgctcttgaactcctgacctcatgatccgcccgcctcggcctcccaaagtgctgggattacaggcgtgagccaccgcgc

SEQ ID NO: 801 - DNA, 162 bp, Homo sapiens
tttttttgagacggggtctcactctgtcgcccaggctggagtgcagtggtgcgatctcggctcactgcaagctccgcctcctgggttcacgccattctcctgcctcagcctcccgagtagctgggactacaggcacctgccactgcgcccggctactttttt

SEQ ID NO: 802 - DNA, 531 bp, Homo sapiens
gtaaagatggcggcgcgagggtctccgccctctgctccgggctgaagcgctctgagagaggcggcagcggcaactcgagccccaacagtaatttagtgttggtagttttggcagcagctgccgaggccggagcaatggcggaactggagcacctaggagggaagcgggcagagtcggcgcgaatgcggcgggcagagcagcttcggcgctggcggggctcgctgacagagcaggagcctgcggagcgacgaggcgcggggcggcagccgctgaccaggcgcgggagccccagggtccgcttcgaggacggtgctgtctttctggccgcctgctctagcggggacaccgacgaggtgagaaagcttctggcaagaggtgctgatatcaacacggtcaacgtggacggcttgacagccctgcaccaggtaactcctttcttggtcttagaggcgtccagtctcctacagatgagcctttgaccctgcgagccaccccatggggagtatcagtgttgccgccgactccttctgc

SEQ ID NO: 803 - DNA, 531 bp, Homo sapiens; identical to SEQ ID NO: 802

SEQ ID NO: 804 - DNA, 531 bp, Homo sapiens; identical to SEQ ID NO: 802

SEQ ID NO: 805 - DNA, 423 bp, Homo sapiens
cttgaatcctgtgggatgagaactgtcattacagagaggaagaatcaggacattatgggcacatagagtagtggcatctacgccagaatgggaaaaagcctggataatttgcaaaggaaatcctgtattaatttttgccacattaaaaaaaaatctttttttagtcctgtggtgttattttgcactgttttatgaccttttcctggatgataggtattctgattacagaaaaaaaaaagattcctctctctctttttttaaattttaaattattctttcatgtatgtgtcatatgtagcctgggagcttgaatttggtaaggcaatcccaggcttgccatcttggcttaaacagaaaataacatattcctcacttaaggcttctaacctggttgttctctttacatagttagcttcctactca

SEQ ID NO: 806 - DNA, 447 bp, Homo sapiens
  misc_feature (5): n equals a,t,g, or c
cttanatcctgtgggatgagaactgtcattacacagaggaagaatcaggacattatgggcacatagagtagtggcatctacgccagaatgggaaaaagcctggataatttgcaaaggaaatcctgtattaattttgcccacattaaaaaaaaatctttttttagtcctgtggtgttatttggcactgttttatgaccttttcctggatgataggtattctgattacagaaaaaaaaaagattcctcttctctcttttttttaaattttaaattattctttcatgtatgtgtcatatgtagtctgggagcttgaatttggtaaggcaatcccaggcttgccatcttggcttagacagaacaatagcataatcctcactaaggctttctaacttgttgttctctttacatagttagctccctactcaactgcagtctgcctgaggttgg

SEQ ID NO: 807 - DNA, 133 bp, Homo sapiens
aatctcattgtaatactaaaatctccacccaagatggaggttatctgccattttctgtacatgtgttaccagaaaggggtcctgatccagaccccaaaagagggttcttggatctcacgcaacaaagagttcg

SEQ ID NO: 808 - DNA, 623 bp, Homo sapiens
ggtgacttcctgatgttgccatggcatttgtaaactgtcatggcgctagtgggagtgtcttttagcatgctaatgcatgagcagtgaggatgacccgaggtcatttttgttaccatcttggttttggtgggttttggctgggtttggccggcttctttaccacttttttttatcagcaaggtctttgtgacctgtacttagtgccgacttcctgtctcatcctgcgagtaagaatgcctaatctctcaggaatgcagcccagtaggtctcaaccttattttacccagcccccattcaagatggagtgactctggttcaaatgcctctgacacatgtgcctcatgtttgggcatgagacctcactgtgtaggtgcagagaagaccctgcctaaacattgcctacacgttgctcctttttcctgcctcaacttccttaaaatgacaagagcagagcccttttgggagctaacatcaggactccttttctgtactctgctccgttgtgctgctagagccacaagcctattaaactttgcctgaaataaattcctatttgcgctggtgttaatttttacttatgagtgagccaagaactcaggccagagttgcggtaacaccaccag

SEQ ID NO: 809 - DNA, 8853 bp, Homo sapiens
agttacattacttcgttcagaaccatttcacaagtgcaagaatggctttgattggacttggtaagtttagagtattgcctgcctgtcagtttgcttccttaagagcagttccttaaactgtaattacgtgaacataggattgaacaaaatttgaaaacttcggccttctatttatgtcagacaggcaatatatcataggattttaattgctagtcatttgttttggaaagcagaatccaacatttaaatttgtaaaccactggctttaaattctttacagtatttgtaaaacctgtgacaaaggtgaatttctcaaagcaaagagcttttacaaacttttttaaaaggaagtacagcttactagaaaaacaggcaaagggcatgaacagacagttcatgggagaaatatgtttgtatatgtgtagccaactatctttgttttaaatgatcagcctcactaataattaagaaaattttaatctgtgatgttggcaaaattaaaagatggactctgcccagaattaaccagggtatggagaaataggcactctcacaaattgttagtaggaatataaactagtacaacattttgggagatctttttgaacatatctgttaaaattctaggctgggcatggtggctcatgcctgtaatcctagcactttgggaggctgaggcgggcggatcacctgaggtcaggagttcaagaccagcctagccaacatggcgaaaccccgtctctactaaaaatacaaaaattagtcgggcatggtgacacatgcctgtaatcccagctatcggggggctgaggaggagaatcgcttgaacccaggaggcagtgattgcagtgagctgagatcgtgccactgcactccagcaagggcgacagagtgagactctgtctcaaaaaaatacaattccaaatgtttacactcatagacccagtgacttttaagaatttgtcttacagaaacattaggtcaagtttacaaagtagttgcatgagaatatcatttgtaatattttttgttttgttttgcaaattacagcttaagatataatttacatgctataaaattcacccttttgaagtgaatagttctgtggtttttaacagattcaactattaccactacctaatttcagggtgtgttcatcatccccccaaaagccccatacccattagcagtcactccccattctcatcttccccctgcctgtggcatccactaatctactttgtttttgtttttttttttaaagagatggaggtctcattctgttgcccaagctggagcacagtggcacaatcatagctcactgccttgaactcctaggctcaggtgatcctcccacctcagcctcctaagtagcaataatctactttgtctctatagatttgactattctggacatttcctataaatggagtcatacgatatgtggccttttgtaactggcttttcttacttagcataatgttttcaaggtccgtccatattgtagcatgtgtcaattcaatgtcttattcccttttatggctcaagaatactccattaccacattttgtttattcattgattggcatttgggttgtttctaccttttggctgtcgtaaatataaacattcacgtgtacatttttcttaggaaacctgtttttagttcttttggttatgtctaagaacagaattgccaggacatatggtaactctgtttaaccatttggggaactgccagactgttttccaaagtagctgcaccattttacattcccaccagcaatgcacaaaggttttgatttctccacatcctcaccaacacttatcgtctgtctttctgattatgaacaacctactgggtgggaagtggtcattgtagttttgatttgtatttccctaatgacaaatgacattgaacatattttcatgtgctttttgtccatttgtataactttttttgtttgtttgtttttttgagacagaggcttgctctgttgcccaggctggagtgcagtggcgcaatctcagctcactgcaacctccacttcccaggttcaagcaattctccggcctcagcctcccgagtagctgggattacaggtgcatgccaccattcctggctaatttttgtaattttaatagagatggggtttcaccatgttggctggactggtctcgaactcctgagctcaggtgatccacttgcctcggcctcccaaactgttgggattacagatgtgagccaccgtgcccagtcaactttggagaaatgtctattcaagtctttgcccatttttaagtttttttttttaattgttgagttgtaaaggttctttatatattttggttactcaagctgttagcagatatattatctgcaaatattttcctgcatttcatgggtcctctttttactttcttgatacagtgttctttgatggacaatgcaatgttgttttaagagctaactattagaaacatgctagcgtccattaggaggggattgatcaaataaatggtggtagagccatagaaagggattctttataaccattaaatatttgatgtagactactcacttagaagtttgtaaattatgaaagataagttagaaacaatatcaatagaatgataccattttagaaataaattgaagataatattaactacacagaaaattctagatgaatagtaatactaagtatatagtaaatagtttagtaatagtaaactgtaattgggtatctctgggagagtggcattatggcaggaagactcttatttattttgtagtgttaggattttacaatcgtatttttaaaacaaggaaaaaatattttacgattgtgttttagtaattgtggttctagctttgtttttgcttctgttgaaacaggtgtgagtcatcctgttctaaagcaagttgctgaacagtttctcaacatgaggggtgggcttggtttatctggtgcaaaggccaactaccgtggaggtaagcatttcattctattagggttaatttatcagaagggcgtttccccactagaatagcatattgaggtggaataggcctgaatatttactactgaacagtctcggcatagaattggatggcttgggtgttgtattttgagcatatgttttgtgtgtgtttggggacaggatggcatggggaaagcaccgagccgcagaaaagactcgtgggttaatactgtgttgtaggaaatactggagaatgaaaccaatggtgaacaagccattttcttcttccctctatccttaatctggccccaggtgaaatccgagaacagaatggagacagtcttgtccatgctgcttttgtagcagaaagtgctgtcgcgggaagtgcagaggcaaatgcatttagtgttcttcagcatgtcctcggtgctgggccacatgtcaagaggggcagcaacaccaccagccatctgcaccaggctgttgccaaggcaactcagcagccatttgatgtgagtctgaacagttggtatctctctttttgctttcaaaggctcagtatttaagatataattctgataatctactcttaaaatgtaagacaaacacacagaaaatctttgtacaattgaagagatagccaggcttgattttagtatctttgaaggcctatcaaaaactcactggcttttccactttgtctattacttgtcattagtaatataaaaagaggaattgaatgcttagaaataaagggaatccacacatccgttccctttagaataaagttgtagatattaaactttcccctagattctaactagtctttttttctagattttcttctgtccgcttctgttcttttggttacttcctgaatctcactatttgttttccaaccaagtggacaagatgaacaccaagaaattgtttacagactcactcattcagcttgagattaaatttgaaaagaaaaatgagaggctgggcacagtggctcacaactaaaatcccagcactctgagaggccgaggtgggcggatcactggaggtcaggagttcgagaccagcctggccaacgtggtgaaacccccatctctcctaatccaatgaagtaatttaatagaaattcctagttcagaactcagccagaaatttagagtataaataggatggcctcagaattataattaaagaaattgaagtccaggccaggcacagtggctcacgcctgtaatcccagcactttgggaggccaagttgggcggatcacaaggtcaggagatcaagaccatcctggctaacacagtgaaaccctgtctctactaaaaatacaaaaattgtctgggcgtggtggcgcacgcctgtagtcccagctacttgggaggctgaggcagaagaatcacttgaacccaggaggcggaggattcagtaagctgagatcgtgccactgcactccagcctgggtgacagagcaagactctgtctcaaaaatatatataaataaataaataaaagaaattgaagtgccttcttatgctttacatggactgagccaatggttctccaagtttattgtacataagaattacctggaacacttgttaaaaatctgggcttccaggctgcatccacagggacctgagtcagtaggtccattttgggaatctgaaagtttgtatttttaataagaacttagataatttttatgtaaatggtccacataaacactgcaaatcgggttcaccctagagagctaaaagctctgctcaaactagataacaatatccctgttattcagaggttaaactcttgatagcttggacatctggataatgaccactaagcagaaatttttctctaactttctgacatgagtgtataagagaaatgaaagtaaattggtgaaaaagtccctaccaacagcagagagaagaaacctggtctgcctaatgccaaagcctatctatattataataataatgtttgcagattagtgtttgcataaacctttaatcatctaaagcaggttagaaaatacccagcataaaggaaagggagcagtcattttagaaatatttaaatgaaaaaacaaagccgtgatagttctgaaagaggtaacctatttacagaatacttcagttcgtgacagaactggctaagtaaaatattaatctattttgtttataccgtgaaggtccaagttttttctaggcaaacttaaagaaatcgtgccctgttttacttggtagaatatcatacagtaaagtctcattatctttcaggtttctgcatttaatgccagttactcagattctggactctttgggatttatactatctcccaggccacagctgctggagatgtaagttgcaaactcaccaaacttctttcatgaacaagttatttctcccccccgccataaacatgttttcggttaaaatatggaatgtttgaatgcagtgcaatgacttatcagagctctgtatagtatgatgtcattgaagcattatctgctatagggaaatttacacatgtatactaatgcttccaggaaagaggagagaattgcctccttcatgttttggttctggttggacaagttgcattgagttggctctgagacatctaaattgagaacccaggagaggggaagaccaggaggtttatttgcaagtcttcagtgtagagattgtgttgaaatcagggatatgtgtgaatgattgtaggaaaagaaaactaaagctcaatttctgggaaacaacaccatttaaggagcaagtggctaagaaaaatggcccaggtaaacagaaagaaaaagagaagctgatatatttgaaggataggaaagagagtatgtttaacaccattttgacccacagtgaaataacattcattaccactgagaagtctggtagtttcagcaagctaggacatcatgggtgatcttaacagttttgactagagtagtggaaattgggtaaaatgtgtagtgattaaggaatgaatgacaagtaagaaatgagaggttggtgtgggctagtggagcttagacattcaaggagcaagttgttttaggagagtttacactgagagattaggttgaaagagacatactgagcaaaaagatcggagcagatatcggagatagaaaattataaatggctcaagtctgagaaaggaatacttgggatccagcacacaagtggaccttttagccttacagacaggctaatattggaagatattgggaagatggggaagtacctcctcagtgagacaggaggctaagtcatgttttgacagacgtgagaggaaagtttaaagaaagtagtgaagtttgggacagacaaatagtgaggtacacaaaaagtgggtattcgctgtagtgtagatgtatccttgaaatcagcgaccacaaattcatagtacagtcagtcagcactgtcatgtaatttttcttcagttgcattcagaagcctaatagagaaatggaggaggtaggtattagggttaatcccaggttggaatcctgcaaagtgggcaggtgagaagtatgaggagatagcaagggagttgggagcattggcaagagtgattaaaaggatgattcagggatctaggctcaatagagaagtgaagccagagggggcctgataaattgaaagactggacaagtcaaggaactagagatcttgataaagtggaagaataaggatagtgagattaaagactgaggtcggggtcttagaattgagggcttcagaggtatgcaaatttaggctatgatcaggtctggggtgtggctctgaaaatgggcagctaaaatgaaggggaaacagaggtcctagaatttaggtgatcagagggaaaaataagtagcagacccagccagcactgggatggagaaaatcatggtcagatttatttatttattcaacaaatatttaccaagtacccacatccccggaactttattctttctttctttttttaaataccatacaaggattcagattccttcttgaccctggcttacaaagtatggacaagccttacaaattggctgtgtatggattactactctcttcttagtgaatagtaagagatagcagtattaatggcatgacactgcaagagtctggggaagttttaaaggtgcttattctttatgggtgattagaaatccatgtgtttggccgggtgtggtggctcacacctataatcccaacactttgggaggttaaggtgggaggatcacttgagcccacacatctctacaaaaaaagctaaaaaattagccaggcctggtagcatgcacctgtagtcccagcttcttgggaggctggggcaggaggattgtgtataaacagctgctttatgaacataggaagaataaggaacccatagtgatgacagcattccgcatggacactgtgctgtttgtctggaactaaccttccatctgtgtttttgcctcagtaaagaagtgtgtcagtgctgcaggagactctggtactgaccacagatgaccaacttttcttatctgtcctaggttatcaaggctgcctataatcaagtaaaaacaatagctcaaggaaacctttccaacacagatgtccaagctgccaagtaagtctcagtattaactgtgttttatgtttttgttatttgaaagttgtattcttttcagattataacaatattacaatctatgctcataaggactgagaagtacagaaaagcgtaaaaagggaaacatacccatatcctaccacctaaagatataattgttaacattttggccaggcacagtggctcactaatcccagcactttgggaggccaaggcaggtggttcatttgagaccaggagtttgagaccagcttgggcaacatagcaagacctcgtctccaccaaaattagagaataattgttaacatttttcttagtttattgatcatgcatttttaaacataattgttaatattgtatatatagatgctgcttgacttacactggggttacgtcctgagaaatgcgcatatcgaaaatgcatttaataccctaataacccagtcatccagccaaacaaacataagtcaaaccatcataagttaagttagggaccatctgtatacttttttatcttatttaaatagcatccttattatagaagtttgaaaattacaaataaaagacaaaaatgatctctgatttccctagcaatgattctgtttccattgattcaaattactaaaaatttaaacaatattcattggtgtgtcaaaatacacttgtgcattttctgcagttataaagatatctttgggcttaaaatatttttgtgtttcgtattactttcttggtgtagattcccaactaagttaagagttataaacataacgaaagactccatgttagagtgtgtgtatgtgtgtatgtttaaataatacatttgactaggcgcagttgctcatacctgtaatcccaggactttgggaggctggggcaggaggatcacttgaggccaggagttcaaccagcctgggtaatgtggcaagacactgtctttacaaaaagatatttaaaactagccaggtgtggtagtgtgtgcctgtagcctcagctactcaggaggctgaagaggggggattgcttgagcccacgagtttgaggctgcagtgaactaagatcacgccattgcacactagcctgggcaacagagcaagaccctgtctcttaaaaaaaaaaaatgtatttctaagtcacaaatctaaagagattgtaccagtttataatcataccaccagtatataagagtacctattctacaatagtttctttcttcataactaatttatacc

SEQ ID NO: 810 - DNA, 766 bp, Homo sapiens
gattgaaagtgctatcaacactcctaattcattagtagttcgagggtttctctaaaagagacagacttgggacaaagttggaaatcaacctgcattttcatacagccgcttaagacatttaagtttgactccatctacttagaacaattcaaaatgtgaatcttgcaactccagtggtcgttatgatcatttagtattgcccacaggggaagcagaattacaacccaggatggaacaaccttttggtcatttctgttcccattagtattgttagttttgttatgctgagcacactacaaagttgcatctcttgtataagtacaacacaatttattaaatattgtatacatagaaccaagaatcgataggatgcagggctgcttgattgtaccagaaacaaaacatgatgagaatacattgaaacactggatttacttaagaaaaacctaagtttttcaaatctaatttatttaagaaaacgtattttcttaataagtgtaacacagttcttacaaggtatggtaataagcagaaagtagaattttgaatattaatgtcaaagtatgttttctgccattttgatggagttgatactttttcttgtaagttcttcctgtagtgaaagagagaaagtgaggtgtcattgccgaaaggacacactaataacctcttggtagtttattgcaggtaaaatcattttttaattaagctgacaacgtggtaaaactgcagcattaaattgtaattatgtttaaatggaagtctt

SEQ ID NO: 811 - DNA, 8082 bp, Homo sapiens
ttttttaattttgaagggtacgctagctgggattttgattggtctggctcagttaaactgctctgaactaaagctcaagaggctttcctatcgacatgggtaagtgaatttattatatgaagctttaagtgaagttatcaaagttagtgtacaacaaatttaaaaactgagttttcttagcatgcatacacaattttacagtattttatttagagagctcatttttagaggactcttaagatttaggcactgatttctattctgagggattagaagtagtttgaaaagagtagtatttggaaaaaacagttatagtttaggatattttaaataattttctaaggttgtaaattagcttattcagtgaaaagattggaagttcttagtagcaattactggcaatttagaaactttgggttaatcttatgccaaagccttaagatgttcaagaaataagaacattggaaaaacacactaatacgtattacctgagtcttgtagaaattattaacattagaattggattttatatatatgtgtgtgtgtatgtatgtatatgtatatttagagaaattcaggttgtgagttaaaaggatgatttgtgtttctttttgatttgaaaaatgttacctgtttttgaagcacctgtaatatttgcccttataatttgtagaatttgttttaagtaaaaaaaaaccctcaaactaatctgtgtctataaatgtatttctccttttgacatactaataatcatttgctctagtttactaggcgttgacaaattattctcatatgcaatcactgagtggcttaatgacattaagaagaaccagctaccaggaatcctgggaggtgttggacctatgcattcactagtacaattaggtgagttttcttcttttttaatcaaaagataagttattttttcagatgagtaattcttatccctttgagaacttatgtgaggaccattagtctagaaaactcacatatgtactcatatacacaaaactttgcctccagttttaggagttaaaaaccccagggttagaatgatagaaaagtctgaactgtggcactgatgttgattttgtgttgactgttgtagtacaaggcctaaaggacttggtctggctcccaatagagcagtaccggaaggatggccgcattgtcagagggtttcagagaggcgctgcttcctttggtacctcgacagcgatggctgctctagaactcacaaacagaatggttcaaaccatacaggtatctttttagactgccttagtctatccaaaaagagccattgtgaaatggttgggtccttttgtttttaaaacgatactgtgaagatatacaaaatgttgtgagtagatactttattcgtagtgatttaatgtcatgcttgttttattgcttaaatgtttagtgttaaataattagaataaagcagtggaatacagtgtcagatttgtttgcctatttcaggtaaattgtaaacattaagttagcagaggattgatttcaccatatttgtatgaaaggatcgtagctaaatttgaagaaggcgttgtagattaaacagaagtattaaagatcattctagtaagtattaagctccatagactgatgtggaaatgttgagtgttctcagtgaacagaggaggggctaaaaatttagctcaatccaggtgttagttattaatttatacttttatgttctcgttataaaagtcatcaattcttgtggtaaagaattcagatacgcagaagtgtcttcattagggtttgtgagttcctctgctcttcctcactccctgtaggaagtgctctgctggtccgtaactcttcagactttcttctaattcatttcttccttttgacaaaatgatccaggcagctgcagagactgcttatgatatggtgtctcctggtaccctttctatcgagcccaagaagaccaaaaggtttcctcatcaccggttagcccaccagccagtagacctgagggaaggtgtggccaaggcctacagtgttgtgaaagaggtaactgaatacttgggtggacacatcagaacccttctgtgcgctttcccaactttcacctaaagagcatttaatggcttaaatgtattctgtagaaatccctgggagcagaatggcaactgccactaataacatgtgcccatatctgtgtgaggtgatggaaaagggccagtctgggaccaataggctgacaggaatactagtgattgcgtgggtggatggattctctctcttcacctgcagaagcactcagggagtgatagaaacaaatgccgtgtgatcgctgtctaggtttaacacatttatactctgccctgcttacctcagatttgcttaagaactagaacttttcagatgaatctcccaccctgatcctattcccatgccttcactatgctgaacgtggaacatatttttttgtacatgtttttatatagttttattatgtatgtatttttatttagtatgtatttataagcaaaacatactagtgttaatgttttaaaagtttccgtaaatggtgttatgtgtctcattctgcaacttatttcaagatagatccatgttaatcttaatccatgtaggtctaatttccacagttttatggtatttcactgtatgaatatatcataatttatttattttcctgttggtggacattcagtttccatttttcccctgaaacaccactatggggagtgctcatttaactctctttttgttcatatgtacaagaaattctttagggtcaactggggagtaaccgttggaatctcgacatgtattaagcattgctgaattgctctctgacacggttgtgccagtgaaccctgtttttttttttttttctgggtgttgtcagcgtcattccctggcatactctttttgacattctttttaatatgacataagggagtttgaggtcatttgacttatgatttgtgttttaggatttcatgaaagatatttttctcagtcatattctaacaacagtcagacgtgcctaggatggtcttttacttgagaaaagtagcctctgtggtcccaaacggcaggaagtccacgaaggtagggccccaagaaatgtattagtggataaataaaggtaagaccaatggtcagctttgaaaaaaagatttactggggagaataaagagataattaccagtcagatttgctcctacagatgtcaggattgagccagctatcaataggctaaaattagatctgtgaaacagacactggggttagtaagggcagtgggcagtaagatgtaatagcagtttgatttaacaacttgtgaagtggttgcctaatttaatctatattaattttaaaataaatgtgtgcttactttgtgccaaatatatggtaatcaccattagagataggcgatatttctaatttacagatgaggaaacgggttctgccagacagtggccttccccaagtaccacagagaaaagggagtggagccaggattggaactgggtatttgggtttaaagtttagttctctttctctaagctgtcactaggaagaatgagggaagggagggtgagattagtaagtgtggattgagatggtaggatgtgcttgtttggacttgctctggattctctattaaagttaaaaaaaaaaaagttcctaagtggtgcttggtatttcttttccattttagatgtcagtaagtcaaagatgaagagaaaatgccttgtgtgtgtcatagataggctcatcttttagatcagaagttggcagactaggctgcagggtagactagccatgcctcttttgtatgggcctttgagctattaataatggtatttacaattttaaaggattgtaaaacaaaacaaaacaaaaaataaataacagagaccatggcccacaaataccttctgtgtggcccttacataaaaagtatgtcaacccctacttacatagttctatttggtggtagtcaggcacttacgagggtggtagtaggaattatttattgaacacttactgtcttccaaactctgtcaagctcttgagatgaattatttaattctaacaatcaccgtaggaggaaggcagcattttagttccctctttaaatgacttatctaaggtcacacagctaaataatagggctgagactggaatttacttctgttgtccgcaaacgtagtggtggtcggcctcgtactctactcatctactcctgtttatcgcaggtgggatagggaggagagctggtggagaggggagggagatggtgcagggaaatgtacaagttgtaaacattgttgtgctcatggtttctcttattggctgttatcctctagatagtttttaaagtagtacttattatttctttgagtttttctggacacgttttttttttttttttttttgagacggagtctcgctctgttgcccaggctggagtgcagtggcatgatctcggctctctgcaagctctgcctcctggttcacgccattctcctgcctcagcctcccaagtagctgggactacaggcgcctgccaccacgcccggctagttttgtgtatttttagtagagacggggtttcactgtgttagccaggatggtcttgatctcctgacctcgtgatccgcctgcctcggcctcctaaagtgctgagattacaggtgtgagccaccgcgcccggccttctggacatcttttttattgctctgtggtattacgtttttgccagatatactgggtagataggacgctcttgttaacttgccaaaatgatggctagattctgggttagttcaaggtccttgatttccctggagaactcaaagttcctttatgctgtccccatcactgaagctgtcacaataatataataatataataataataatggaatgttgctttgagttccctagggatttctgagttagataaatggtaaagattcagaagtcatgtgaagttttaccacattggtttgacctacatgtttgtatattcagcttcaaagctcagaagtcattactagcatagagactgaataaatgaaaaagaaagcttagcaatcatcattattttattatgttgtgagaaagatggaaaatgctactaaagttttgttgagaattattaaacatgttcctgctttttgttctcagaattctctaatccaataaaatgttctattgagctttttatcttaattgaattttccatttttttcctaatacatagccagtaatttaaaacaaattaagtaatttcccagagcttagtagaattaggttgaatcaaagggaactatcaccatatttctttagtgaatatattcaagaagctttgtttgccaagtttgatttaactggagtgattaatagtaccagcaaagcccgtatttctgtcttcccaatgcgaaattttagtttacctacattttccacgcactagtgtcacaacaaaatactaagtcataattgcctctttcccttatagttagaattctgtcattaaaaataataatcctggtttatctaaaagcatggcatttttttttgtctggttacaaacataatgttacctgctttaaaagtgtgtactgcaggatagcttagagagttttccgaccagagtttgttcactgccctcctctctcctacctccctcctctacgcagggaatcacagacacggctcagaccatttatgaaactgcggctcgagaacacgagagcagaggggtgactggtgccgtgggcgaggttctgcgccagattcctccggcagtggtgaaacctctgattgttgccacagaagcaacgtcaaacgtgctgggtggcatgagaaaccaaattaggccagatgtccggcaagacgagtcacagaaatggcgccacggggatgactgatggcttggaactgacagtgtgaagataaggagagtggaaccaggagctcagagtcctgacagcagcttcagaggaagctcgtttaattttattgtgctcatctcaggaacaaaagcattttttagttaaataatttaacatcaaaacaacatgcaaccaaaaacttctgacatttatagttgatacttgcctatagaaatgtttggtggctggtgtcaaaggtccttaaagcatttgctgccaagttagtggaaggctcacttttgttaagatgactgtaattctccttgttaccgacgagagatcattggaagctgccttctaacactttgtgtagctctgtggagttggattttcttaaggtttaaaaagaatcacagcttcggaacttttaactgaaaatgagagacagaagccacaggggaagcaaagcaaataggattttcaatataaatatcagtgtggaaaaataacctattctgttgaatttagtgttcatgcacttgagaacaacattatttccatttactccgaaaatccttctgtgggggtttgagaaagtgaatgttgcagacatgttctgttgtgttgcactttatcctgtgtttatgtgtatgtgtttttagattaattcaagttgtgtgctatatttcttgtataatttacaaagttacacaaaatataaagagcagtaaacttgtctgaaagtttttggcaaaggaaggtaacttcaatgtaatagcttcctttaagagtacaggaaaatgcattctgtaatgaagtggggcccatgtaattgtttatattttcagttttaagcaggtatagtgcaggcttgttaggaatgtgtggaagggaagattggaagtgatttttcctcttttaaaagtaaacaaaattcttcaaatatgccctagttaactatttcagcataccatttttacttggttaacagtgtacattttgataacctatcaggaatgaataaagtatttttatttaaaggtgatattgttttatgcttccatgaatattttgcttttcttagagcatattcatagatgcagtactgtgatttaccacaagataattgggaacactttctcaaaatcgattttggttaatatcaggtaaatcattacctaggagtaagagggaaattgttgtcaattcctgactttagattgatccagcagaaagaaaaggtggaactttgtatatatccactgttgaaagttgcatgacctgacttcctgttttctaaagttgggggaatattattgaacttcaatttcagaactgcatttcaatttggggcttggaaaatgtagttaaatcaatttcgttctctaaattttctaagcaggaaagcaatgtaaaccaaaaatcaaaatgtttagaatttataaaaatggggttatatagcttttaattttagtttcctttttactgccaaaaaacttaaaaagacaacagcgtaaccacctgtttaagcaccgtgggaccatctcttattcgggtagagcctggtcctggcgacacactaacaggaaggcgtgctgtgttaccgggaaggcgcctctggctgtggggtgcgttctgaccaccccgctcagatgccagcattttccatttgcccttaaggaaacttgctatgtgtgttaacccagttatgattagtcaaactggaaaacacttgatcaaacttaaaattgtaaaatctgtctaacttttaaatatactttccacagttgtacttaagttcaattaactacagtatagagaaaaataattattctcttctttgcacccggagttgcaaacaaattaagtttacaaatctcatttaaacatatatctttgtaatgtaatctccgcggttctttctttgttctaccctcctgcacctgttgtcgatgtaatcattttgggaacagaaacgttgtgtctcaaaaagattcgttgtcagttcagccaagatgttctttacctgagattctggaaagatgtttatctatatcggaacacttctacattattaaatgtccttaagctttttcttttttacaagtgtcttttcagactttggtgttgtgatgacacagtagaaagagcgtggctagaatccgtggtttgcc

SEQ ID NO: 812 - DNA, 2078 bp, Homo sapiens
aaaatgatagtgccaattcagtggaagtggttaatggcatggaagagaagaacttctctgctgaagaagcatcttttagggatcagcctgtgttttttaggtaactaatttagttttaataacaaatgaagttattttagacttttgaagattgttctgtgatgtatgtgtgctggtaatcatgaggttccgtcagcttttctttgcactgccaaatcatcagctggtgtatttatctgtttgtggtccccatctaattgcaccccccttatttgcacatagtaacctggttccaaattcgtctctctttcaattctctggcaggaatttccttttcttctagcttcttccttctttttctctcctctgtcccctctttccagcactgttatggtgtgtttgtaccagcccagcaggatatcatccttttgctttttttcctttatgtatctcaacctggctatgcctgtctgtcttttcccttgtggggattttctacctattttctctgtctgcccttcccagtcgttatgtgtctttcctgacccttccctccctgctcagtgggcactgttaagagacccaggtccgctgtgctgctgccgtcggctgtgactgctgcccaacggctcggccagctcgagcacagcacactgcagtttcctcatttacagacctgtttgttcttctcatcttctttcttttccaaaactggatggtagggatggtggcttggccctatgggaaagagaagggactgaagatcagtgcccccttgttatgaggagcagttacatcttccctgattttctgtgctgctttctcatatgtcccgggttgctgatttctctctttctctctaggttctgaagttagactttaggcatgggccaaagtcagcagtattactaattggaagggttgtcacgttttaaatattttgcatagtgatgaaaataggtagaaaaaatggaatatgataattggaaagatcttggaatagatgattcctggtggttctaaatctttccaccgccaaagaaggaccttttaaaattaatttcctacattgatccttttatttttacaaaaacatgtatcttaagtgataatatgcattcttattttattagtcacatttataaactgccaatttggtttttgtaaacatgggcctgaaagcaaagaattttgccttttttttttagcccagaggaagtagggttacccatttatttacgtttaaaaagtacacaagccctatacttacttaggtaaatgtttattttttccattagactatttaaaatattgagaatagcttatagattttcatttgtactctcaaaggctcctaatcagtgccatagtctaaattacacaccttacaaatgaggaaatgaatgcccagagagattagttgacttgctcaagaccacagttcgtggccaaggcacaactagaacacagattttcttatctctaatccagaaaatccagtacagtttttagtaatgtcatgagagcccccttcctccaaacatttattcattttacaaatatttactgagcacttaactgtatgccaggttttgatctaggcacaaatgaacaaagtagagaaaatatttaattgagtttacaaattgagattacaaataattaaaataaatggtttgtcctattaatatgtgccatggagaaaaaaaaagtgagaaaggagagtattggagggcactggcccgacagccaagtggagctgagtattcaggggatgggcgtgacctggggtctgaggcttctggtagtgattggtgtaaatatagcatctccattttgttgtaggcgcagtggactttggtgagatggcttaggatgtaaccaccaacattaattctgtgggaaaactgtgtttcaagttccaaacattgtttgcagccaacttttggaagccagatcattttgttagatgtgtaccatcagtgtacaaccagccctctatatctggaattctacatctgagattcaaccaaaatattaattaaaaaaggcaataaaaataatacaaattaaaaata

SEQ ID NO: 813 - DNA, 2260 bp, Homo sapiens
ggttttggatgattaggctgtgtgtgcgtgtgagaatgatcacatgtggcgtcatgctttgtacagagcctcagaccactgggcctcgtccagtgagagtcctctctggcgacatcacacgcggagcagccaggggccaccttagatctcagatctctcagagcaatacttttctgaactgccactgtgcctgggtggttgggttggtgtcatgcttctgactagagtagatcgcgcatgtccaccagtgatacgttgagtccttacagttccccccatggagtcccataagcagctccatcgagatctgtcagcaagttgcaggaccccacaatgttctgacatgttaagacccccttacatgacgagtagagaggcagctgaggccacaaccgtgtcttcctcttgaatggagctaactcggaaccccccgttttctcttcctttctgcccaccactgaacattgccttttagataactcagtgtttcttctagatgtcatagcaatagactttcactttcatgaagtttgggtacgatttggattctcgcttaagtacatatatttatcaatatttttataaggcaaagttcacttaaaaaatctttccaagtagcagtgtgcctaagatggcaaaatactaaaaactggtgtttcctgctcctgttgtgtgtcacttttcaagccgattgaaatatttctggcttttagggcattactttttaactatctcctttaaaaacgatgttctgtaggtttagtgtctttgttcatttccaaaagagtccagacaactgtgtctgcccctgcagaggctgtttgtccaaaggcagcatgccgcttccaccggaatgcagacagcaggggagcggaattctaaagcagcgacttaaaatgaggaatccccaattgcactaaatggtttcaggattgactaatcattgtcttaacattaactcagattttcaatgtgtaaagagctgtgtgacttggcgtctgagagatccctctgctttgctttgcttcagagtcctcgcacccgcatcctcagaactgtggggcatggtgggctctaacgagcactccccttctgttttccttcattacttttgacctccttaagacttcagagagaatgtccgtcaagttcttttctccatcaagttctttaagttccttgaaaggaagggactgtgcaaacacaaagcaatattcttttgtatctgcaaatgcatcagctggacataccaattggtatcaaatagaataaaatcaaatataaatgtttgagtcttaggttaaaaaggaaggttatttgtatagtttatagataatgaaggaaaaatttctttttcattgcaggaaatcttgtttactggaagatagagtcactcttttcatataagacaaatagtgctttaatgccaacttctttttatctcaacatttcaggatcatgctaggcacactgcccccttgaatagacattatatgcacagttgcaagtcagccaatgtttttattcagaagtatttccccccattatagtgcctgcatatcagagatacaaaaagcatccaacacactaccgtaataggcttctttggggatgagaaatttgagtctcaacaactcagagtttgagatgtcagcttttttggtaaacgtaggtgttagaggtatattttgctttcctacaacaattgttggcccttgatttcaagcatgttgcttcataggaagcaccagagtgccatctgctgcatttcaagagattgtaaatgtcatctcagctggctcagttatatctctaatgtcccgggtagcagcacctccctctaaaaatatgtttacttcactgtttcacttgtattttgtgtatacgaaatggcagcttccgatttctagttggatttgtcttgcattgtttgtataacttgctggtcacccagggctatttgctttttcattgagaaatttggtaggggtgtctagttcagcttttatgttgatccatcctgacttattttagacattgaatttatctcaccacaagtaaaagaacatgtgtattgactgtctttgctaagtttcctaatttttcctaattatggcaattatggatgtgaataagaatactgatgctgtacaaatatttttgtggaaatgtaccttgttaatgtgactatttaaataatatgaaaataagaatactcttgaagaaaaaattaaaatatttactctttggattttgcttt

SEQ ID NO: 814 - DNA, 4206 bp, Homo sapiens
caggctccatctactctttgaagcttctgcccagcttgcattgtttctaggagaacccgcgtcatacctttatctatagccttcccctaggtcttcagaagcatcaagttttaactgtggacattggatttggtggaacagcaatcatggtaagctgtatgataaggctgagggttgaaatgtgctgtaagggccgaaagaaatagtttgccagcatgtgcagtgatcttgggttctgaatgttagaaataaggatacatccatggatatggattctcattgcattgagtatcagctgaagatgagctgatttttttatttttatttttttcagacggggtcttgctctgtctcccagtctggagtgcagtggtgcgatcttggctcactgcaaccctgggttcaagagattctcgtgcctcagcctctttattagaaacagggtttcactgtgttggccaggctggtctcaggctcctgacctctggtgatccacccacctcggcctcccaaagtgctgggattacaggcatgagatgagccactgtgcctggccatgagaaatgtttcatgatgtgagaaaatacaggagtttttggtcatgattccaccagtggtgaaggactgtcctgcagatgatggactctcaggtcagattacaatagaaataaagagggctttgaaaatggaagggttttggcattaacagtacagagaaaagcagtctggagagagagaacaccctacatcattgtggtttggtttacttaggggagtggacagtttagagcatgcatcgtcacagagaaggataatcacctgtaaggaggtgaaaattggttcttgagatgtgaaaaaatacttcataatcctttgtggtcctccaaagagccatactaaatatggaagaatgttggtgaaaaaggagagaatatttgtttagttaaggaaaccaggcttagattatgtaagggtggagaagaaacaggagaagattagaagactagggtgttggcaagctgaacatgactcttgtcttactgcttctagactgttggcaagagtagcaagatgctgcagcacattgactatagaatgagatgtatcctgcaagatggccgaatcttcattggcacctttaaggcttttgacaagcatatgaatttgatcctctgtgattgtgatgagttcagaaagatcaagtaaggctgatttgggcaaatgggggttggacacagaggcagtgggaagggaaggccagagctggagtaagggatttccgagggtaactgaagtagttagggaaactatggtagagccagtctattgtttaacctcttgacctgatctctgaattaggtcagagtctgcatctgaactcttttaagtttgtaaaacaatcatggatttattactgggagtaaaagtatatgctatggtcagaatactcgtatttatttttaaaattgagaaaaatgctatattaattaattggttggcttctgcagcagtcttagaccaaatcttggttgaaatggagaagaacagttgttcttcatggttgaggagttgggatatggttgccatttggtatcctctctttgcctatcactgttcccattatttcagttctgtgtcacctgtcattatgatttaattatttaagtaattttttaaagaaatttccattttaatgtggaaacccaggtttcaattttgtttttcttaaaaggtatttcacaaaagaaattagtcttgttgtagtgtaacatcaaaggaacattctgtaaaagactaaagttagattagaaaatagcttcactatttacccttgtatattaactgtgtttacagatattttttggcttgtttttcagtgataactcagtaaatgtttagcatcagttgtcttaattgatacttgaggttgtataaatattttgatgagtgagtgatcactaaaatttatctcactaaaatttaattctgatttgtaggccaaagaatgcgaagcaaccagagcgtgaagaaaagcgggttttgggtctggtgttgctgcgtggggagaacttggtatccatgactgtggaggggccaccccccaaagatgtaaggaagatgtagggcaggacagaactttaatttgcagggacatcatattatgtgagatgtctgaaatcagggtagagcagacacagttcaacatggattgtcaaataaaatgtgccaggcacttaatatcaattgttggttgcctatgctattcgggattaggggatttttggtgaattattctatgtgctgggcattacctaggtaagggtaggagttggtgattcatgtttgcttggtatgtttataaaagaggtgttttcacaatttgacaaataatgtgcattttatacacaagatacctccatggtatacttgcttgtttgttcatttggacacagaactaatatgagataggtgtcatgggaaaatggtggagagaagtgatctctgatgaataagaatactgagaacttgtaaattgtttgattttaggctatgaattttcttgtttcagactggcattgctcgggtaccacttgctggagctgctggaggccctggggttggtagggcagctggtagaggagtaccagctggtgtgccaattccccaggcccctgctggattggcaggccctgtccgaggagttgggggaccatcccagcaggtgaggaaccagcagagggttttatattattgggagaatatgactaagccggaggccgaggagatttaaaaacctaagtgtatgtgtcatacaatgtaaacagcatatggtttaggaggaaccaaaaaacagatatatgggaggaagggaataaaactagctgcttaaaatggtcattgggtgattaaagttacccaagttactcttggcaagagtaacttgccactagtggtgagtgaacagaatgcatggatataccacagttgaaaagaccaaagggctttttggatgtcagtgtactaagattagtttttaaaatatgggaataggccgggtgcagtggcttacgcctgtaatccagcactttgggaggccgaggtgggcagatcacttgaggtcaggagttcgacaccagcccggcccacgtggtgaaaaccctatctctactaaaaatacaaaaatcagctgtgtgtggtggtgggtgcctgtaatcccagctaccaggcagggagacaggagaatcgcttgaacccaggagtgggaggctgcagtgagctgagattgcgccattacactccagcctgggtgacaagagtgaaactgtctcaaaaaaaaacatgggaataatgagagaagtacattgcaacagttgtttgtaactaattggtcatttttctcatttattttctgtgtttgaataatgtgaaggtttgcatcgctttgactgtttcccgccctgccttctcaggtaatgactccacagggaagaggcactgtagcagctgctgctgttgctgcgactgccagtattgctggagccccaacacagtacccaccaggacggggcactccgcccccacccgtcggcagagcaaccccacctccaggtaagggattggtgaacacgaagacgaacttgaatctctgatgatagcttactgatttaagacacagcctgagagcctaagaatttggggaatatgcttccttcttctagatactggtttttaatgaaagacatagaagagtaattgtcatatagaagttatttgactctatcattgttgtctggcccatttctttagggattatttgggctaaattctaacttttctaagccattttatgaggcctttatttctaccatttttcactgtaggcattatggctcctccacctggtatgagaccacccatgggcccaccaattgggcttccccctgctcgagggacgccaataggcatgccgcctccgggaatgagaccccctccaccaggcattagaggtgagtgggagcataggggtttgatggttcagccaggcccctgaatatgtgtatcctctttttctcaatgtttctatttcctttccaggtccacctcccccaggaatgcgtccaccaagaccttagcatactgttgatccatctcagtcactttttcccctgcaatgcgtcttgtgaaattgtgtagagtgtttgtgag

SEQ ID NO: 815 - DNA, 8957 bp, Homo sapiens
aggcgcgctcgggcgaggtaggagcgatgtggcctgggaacgcctggcgcgccgcactcttctgggtgccccgcggccgccgcgcacagtcagcgctggcccagctgcgtggcattctggagggggagctggaaggcatccgcggagctggcacttggaagagtgagcgggtcatcacgtcccgtcaggggccgcacatccgcgtggacggcgtctccggaggtaacgctccgttccgggagtcgttccaagacctttcccgagcttgcgctggaatggaggtcctggaggtgggggtgggcggctcctacactcttagctactgttccccttcgcatctctcagggcgactttatggcttcctaatattgactcttgcctggttaaacccttttgacggagggaggcgatttgcccagcaagaaaacccgcatttcttgagcggctcctttgtgaaggtctctaccaattgttgctgcacgtgaactcctgctaacttctagacgcaggaatgactaattccactttacaaacgaagaggctgaaatccacagatgtgaaatggcttgcccaaaagcccccagctagctgcaggcagcgctggaatattggagctggaacattgcctgactggccagagaggacagcttgctgggtaaactcatagcaagcaaggggtcccagggctgccacagaaatcacatgatgagttggccctgccaggtctccctcatttctttctttccttttttttttctgagatggagtctcgtcttgctctgtcgcccaggctggagtgcagtggcgagatctcggttcactgcaacctctgcctcccgggttcaagcgattttcatgcctcagcctcccaagtagctgggactacaggcacgtgccagcacacccggctaatttttgtatttttagtggagactgggtttcaccatgttggccaggctggtctcgaactcctgacctcaagtgatcctcccgcctcagcctcccaaagtgttgggattacaggcgtgagccaccactcccagccctccctcatttcactctaaccagtggttacacctgacttattcgtgtcaggcctcaggtgagtggtaatcatcaacaagctcccaaagctgccttctgcccaggaaataggcatagaacccttggtgctgttgcactcatttgtaaaacagaggtcccaggtaatcccttctctccctcaggggaagcttagagccggtcaaaagatgggaaattaggagacccaagttctcatcctgtttttgcctttcccaggctgtgtgaactttcccctctggctgtttgctcctaaggtcagctgtgttcactctgggctttagaattcggggactggtatctcaggcacctacctttgggggtgtgattctggcagcaaagtaaactgtggagttccaggactgcagcaggcgtctgatccagccctcttctttaaccctcaaggaaaccaaggggtcagataaggagtcagtggtggtcttcaggcacaggagaagcctgtgaggaagggctgagttcctccttgggtagaatgtgattcaaagccagagtttaggctgggcacagtggcttgtgcctgaaatcgtagcactttgggaggccaaggcaggaggattgcttgaggctaggagttcgagaccagcacggacaacataatgagaccccatctctacaaaaaataaaaaaatttaatcgggcatggtggcacgcacctgtagtcccagctactcaggaggttaagtgggaggattgcttgagcctgggaggttggggctacagtgaaccatgattgcaccactgtactccaacctgggcgacagagctagaccctgtctcaaaaaaaaaaaagtttaaacttcttgctcttcaagatgtgtagcactgacgctccttctgtagctgttgaatttggtgcctcctcaatggtgactccaggtctgtttcctttctggaccatttccccagggcctggcactgtcatctttccaggcctgcccttgccccacctgagctgctgtatccatctcctctccttcacctcaggaatccttaacttctgtgccaacaactacctgggcctgagcagccaccctgaggtgatccaggcaggtctgcaggctctggaggagtttggagctggcctcagctctgtccgctttatctgtggaacccaggtacacagtgagtggtggggggttgtggggactgaccccagctgcctgcttcccacagtcagcaaggctggtttagccagctcagctcagccacagccctgggcctactgttggcctcagagctgtgcagcagaaaggctgagtgcaggcctctgttttgctgaaaagctttggccaaggaactttatatatatattttttctttttgagacagagtcttgctctgtcacccaggctggagtgcagtggcacaatcttggctccctgtaaccttcgcctaccagactcaagggattctccatgcctcagcctcctgagtagctgcgattacaggcatgctaccacacccagctaattttttttttttttttttttttgagatggagtctcgctctgtcgctgaggctggagtgcggtggcatgatcttggctactgcaagctgcgcctcccaggttcacgccattctcctgcctcaacctcccgagtagctgggactacaggcgcctaccaccactcccggctaattttttgtatttttagtagagacggggtttcactgtgttagccaggatggtctcgatctcctgacctcgtgatccacccaccttggcctcccaaagtgctgggattacaggcgtgagccaccgcactcggcctaatttttatatgtttagtagagatggggtttcaccatgttggccaggctggtcttgaactcctggcctcaagtgatctcctccaccttggccttccaaagtggaaactgcctttttgagcattcattttcccacctgcaaaacagagtccctcacacctgaccttctataagaaaagaggagtaggcggcaggaactgagactaagggctctggggctgttctgacgggagcacagttgccagtgctgccctttagtgtccctgttcctgtgggcaagtatcttaacttttctctgtctcaattacttcatagggaaaatgaagataatagcacttaataggatcattacaaattaaagacttaatacatgtaatgcttagaataggccgggcgcagtggctcatgcctgtaatcccagcactttgggaggctgatgcaggcggatcacctgaggtcaggagttcaagaccagcctggccaacatggcgaaaccctttctctacaaaaatataaaaattagctggcatgatggtgggtgcctgtaatcgcagccacttgggaggctgaggcaggagaatcgcttgaacctaggaggtggaggttgcagtgagctgagatcacgccactgcactccagcctgagcaacagagtgagactctgtctcaaaaaaaaaaaaaaaaaaaaaaagcatagaacagcctggcacatagtactgctcaatgaatgttggctattatttattttccaaatgttacaaaataaatttatataagtatgaaacttaaatagtacttattatgtgccaggaattcttttaagaaaattacaactattggccaggcgtggtggcttatgcctgtaatccaggcactttgggaggccgaggtgggtggattactgagttcaagaccagcctggccaacatggtgaaaccctgtctgtgctaaaaatacaaaaattagctggccgggctcgcttgaacccatgaggcaggggttgcagtgagccacgacggtgcgaccacactccagcctgggtgacagagggaaactctgtctcaaaaaaaaaaaaaaaagaacattacaagtattaactcattaatcctaagtgatagttgctattcttattcccgctattgagatgaggacactgagatccagagaggttaagtgacttgcccagaggcacacagcctgttgtgggatttgaaccctggctcaagagtccatgctggctgggcatggtagttcacacctgtaatcccaatacttttggagcccaaagcagaaggatcacttgatgcctggagtttgagaccagcctgggcaacatagcaagaccctctctctaaaaaaaaaaaaatgtttttaattagctgggtgtggtggtgcgcacctgtagtcccagctactagggaggggaggctgagttgggaggatcacttgagcccaggagttcaaggctacagtaagctatggtctcactactgcactccagcctgagtgacagagaatccctgtctcatttgccaaaaaaaagaaagagtctgtgctcctgactacttgtgattatcattaactgccctctcagaaaggtgagagtgaaatgaatgtcagaggcagaactcctgactcgcatccagtcacttcccagcaaagccctcacccagacccaacagttttcaaatttacaaattagaggcccaggtgaacccagaattacctctgtgatctttttcttcaccattaggcgaccaaaaaagacactcagtatggtgttaggaagacacatctttcttctccacgagtgcccgtaattccaccattagactgccactgtaaaaccaaagtctgcccagggagggaacctaacaggtccccagttcctcagtgggaactgtctgtcagattcctggcagctctgggatagcccatgtgtggcagaaagtaaggagactgaggctgcaggctttctgggttgggtctctgtggtcctccaagcctctgtcccctcgaacttgtcccacatgaccccacaggcatcaacacgtgtctcactcattttcttcagagcatccacaagaatctagaagcaaaaatagcccgcttccaccagcgggaggatgccatcctctatcccagctgttatgacgccaacgccggcctctttgaggtgtgtggaagctgtcctgcgggtgagggttggtggggcctgttaggctgaggaaggcttgggtgtgggcagtcgggagaacctagcaggattcagtgccatgcctagaggctccagagcccgcttctggaggtcaaggttgggccaggtaggtgctccaggaggaatcctggggcttgcagggagcctgagttccagagcctttgggggataagctacatcagctggaaggctgggggaggcgggggcctggtactcaccaaatatattctcacctcctcttactagagcagggcgctggtccagcccggcactgagacacgggggccccagagagaagcacagaacaccttgcctctctacccagaggagcgccctggctggcagtacagttttttgatttgctggagtcccggtcaagggagaagcccagggtggttaaatgatggctctacgctcactgcctccctccaggccctgctgaccccagaggacgcagtcctgtcggacgagctgaaccatgcctccatcatcgacggcatccggctgtgcaaggcccacaagtaccgctatcgccacctggacatggccgacctagaagccaagctgcaggaggcccaggtggggcgacgcctgggtccaccctcagcctccgcctggggaaggaagtgaggcttagagaggccaactcctcactcacagagatagcctgaaagtttgaaacagcagagatttgtccaagatgtgaacccagatccctcacacccagagcattattcttttttttttttccctgagacagagtttcactctgtcgccaaggctggagtatagtggtgtgatctcggctcactgcaacctccacctcctgggttcaagtgattctcctgcctcagcctcccaagtagctgggattacaggcatccgccaccccacctggctaatttttgtatttttagtaaagacggggtttcatcatgttgtccaggctggtctcgaactcctgacctcagttgatttcacccacctaggcctcccaaagtgctgggattatagacgtgagccactgtgcctggcaccagagcattattccattgtgccatggtgccttgaggtttttccctgtgtatgtgtgacagtctcactctgttgcccaggctgtattgcaatggtgcagtcatagctcactgcagcctcaatcttctggactcgagcgatcctcccacctcagtctcctgagtagctgggactaccggtgcccaccacacccagttttttatttatttgttttttagatggaatttcactctttttgcccaggctggagtgcaatggcgtgatctcagctcactgaaacctctgcctcccaggttcaattgattctcctgcctcagcctctggagtagctgggattacaggcacacaccaccgtgctcagctaattttctatttttagtagagatggggtttagccatgttggccaggctggtttcgaactcctgacctcaggtgatctacctgtctcagcctcccaaagtgttgggattacaggcatgagccaccgcacccagcctgtttgtttgtttttgagacagggtctcactataatgctcaggctagtcttgaactcctgggctcccaaagttacaggcatgagccaccatacccagccagtttttaaaatttttagtagagacagggtctcactatgttgcccaggtgggtctcgaacccgtaagctcccaaagtcctgggattacaggtgtgagccactgtgcccggcctgccttgagtattagcaagcaccttctgtgtggcaggcccttgctaggcataaggatagaatgtacatgttggtgagacctggtcccagcctagcctgccctctgggaccttacacaggagactgagatgtgagcccattctcactgtccagagctcagggtggagatgggtgacgctgagaggcacagatgagggagaggatgttccagcccccaagatggtggtacctctgtgcccacctctgtgctgggcactgggcaggatgagctctcagagctccaagcagcacaagagacgggtggtttggcccaacttgacaccacccaccatctgctcatgtctttcctgcagaagcatcggctgcgcctggtggccactgatggggccttttccatggatggcgacatcgcacccctgcaggagatctgctgcctcgcctctagatatggtgccctggtcttcatggatgaatgccatgccactggcttcctggggcccacaggacggtgggaccatgtggcacctgaggcctggggtggggcttctgagggtggctgggaaacgaggaggccagtccccagcatgatccataatccctgggctctcaggaggccagtgacagcagcggtggcttcccttgcaggggcacagatgagctgctgggtgtgatggaccaggtcaccatcatcaactccaccctggggaaggccctgggtggagcatcaggtacctgcaaggttgtgtccctggggtccccttgtccttttgaagggccctggaggggctcagggaagtggggagggcagcatggactgtactttcaggagggggttgggtaggctctggcccctgaccaacccctccccccacctcttcccttcttctcagggggctacacgacagggcctgggcccctggtgtccctgctgcggcagcgcgcccggccatacctcttctccaacagtctgccacctgctgtcgttggctgcgcctccaaggccctagatctgctgatggggagtaacaccattgtccagtctatggctgccaagacccagaggtgcgactcccagcagggcaggctcgggggcggagagacgtggtgagagccagcctcatgtgtctgcccaggcccacagacagctctgtgcccaccgggtctgcttctgcctgttcccctcccttctctctgtccctgcctctcccctctagcttctgtgtctccttcttatccctcctgtctttccacctcccttgttgttctccctgccccctgcctggctcccctctgcctcttagagcttgtaactgtctttgttgatccttcttgcagacttgggcatagacctcgggcctggtccctgcaaggagcgggtgtgaatgctccacggccccttagctacctgtgacaccttgtgcccacaggttccgtagtaagatggaagctgctggcttcactatctcgggagccagtcaccccatctgccctgtgatgctgggtgatgcccggctggcctctcgcatggcggatgacatgctgaagagaggtaagggtgctgagacaagggaactggtggtgggtcctgagagaagagaaagggaaacccctagactgtgacccagccccgtacccagccacgctgcggcctcttaggccagctgtctgtctaagcttgaacaccccaagccatgaggcagtcccgaatctgagacctggggcagttcccttgccctctgtgttctgcccccaagcctgttggttctggcacgcccttgctttctaccctcccaggcatctttgtcatcgggttcagctaccccgtggtccccaagggcaaggcccggatccgggtacagatctcagcagtgcatagcgaggaagacattgaccgctgcgtggaggccttcgtggaagtggggcgactgcacggggcactgccctgagctctgggtaaggacgagaagagccaaggtccgcctactgccacagggtcaaaggaggttttcgatcagcccagaccagaggctctgagccctgaaccaaagtcccagagctgggctgggacgtgacctgtgctgagggctgtgagaatgtgaaacaacagtgtgaaaattggctgtgac

SEQ ID NO: 816 - DNA, 2182 bp, Homo sapiens
agaggaggcggaggcagaggcagaggcagaggcagagcccgagcccggtgccgagaccaagcgacagaccggcggggctgggcctcgcaaagccggctcggcgagctctcccgacacccgagccggggaggaaaagcagcgactcctcgctcgcatccccgggagccgcactccagactggcccggtagtcaggggctcaggagcagatcccgaggcaggctttgctcagcctccgacgagggctggccctttggaaggcgccttcaacagccggaccagacaggccaccatgaccgagaattccacgtccgcccctgcggccaagcccaagcgggccaaggcctccaagaagtccacagaccaccccaagtattcagacatgatcgtggctgccatccaggccgagaagaaccgcgctggctcctcgcgccagtccattcagaagtatatcaagagccactacaaggtgggtgagaacgctgactcgcagatcaagttgtccatcaagcgcctggtcaccaccggtgtcctcaagcagaccaaaggggtgggggcctcggggtccttccggctagccaagagcgacgaacccaagaagtcagtggccttcaagaagaccaagaaggaaatcaagaaggtagccacgccaaagaaggcatccaagcccaagaaggctgcctccaaagccccaaccaagaaacccaaagccaccccggtcaagaaggccaagaagaagctggctgccacgcccaagaaagccaaaaaacccaagactgtcaaagccaagccggtcaaggcatccaagcccaaaaaggccaaaccagtgaaacccaaagcaaagtccagtgccaagagggccggcaagaagaagtgacaatgaagtcttttcttgcggacactccctcctgtctcctattttctgtaaataattttctccttttttctctcttgatgctcaccaccaccttttgcccccttctgttctgactttataagagacaggatttggattcttcagaaattacagaataattcatttttccttaaccagttgtgcaaggacagcaacaaccaatctaatgatgagaatgtacttatattttgttttgctattaacctacttacggggttagggatttgcggggggggcttgtgtgttttgttggcttgtttgccatgaaggtagatgtgggtggggagaagacacaaggcagtttgttctggctagatgagagggaacccaggaattgtgaggttagcaggaatatctttagggtgagtgagttttctttgagttgggcacccgttgtgagagtttcagaacctttggccagcaggagagaggtggtagggagcagccagccggcaaaggaaggagggggaaaaaaaccgccaccgggctgacttccacctcccagtggtgagcagtgggggcccaaacccagtttccttctcatttttgttagtttgcgctttcggcctccctattttcttagggaaggggagtggggtccaagtgacagctggatgggagaagccatagtttctcccagtcagctaggatgtagccattgggggatctttgtggcttcagcaaattctcttgttaaaccggagtgaaaacttcaggggaagggtggggagtcagccaagtgcctcagtgtgccctgttgaaacttaggtttttccacgcaatcgatggattgtgtcctaggaagacttttcttttcctctggatttttgttcctcctgtacaagaggtgtctttgcttggtttggtggggctgcggccacttaaaacctcccgatctctttttgagtcctttattataagtagttgtagctgcgggagggggagggggagtgggcgggcagtggatagtaagacttactgcagtcgatttgggatttgctaagtagttttacagagctagatctgtgtgcatgtgtgtgtttgtgtatatatacatatctagggctagtacttagtttcacacccgggagctgggagaaaaaacctgtacagttgtctttctcttatttttaataaaatagaaaaatcgcgcacttgcgcgtcccccccccacccccttttttaaacaagtgttacttgtgccgggaaaattttgctgtctttgtaattttaaaactttaaaataaattggaaaagggagaaactga

SEQ ID NO: 817 - DNA, 5312 bp, Homo sapiens
ctggagaaagctgggagatgcagccagctccaagccctccatacggcagcacctgtctgggaaccagttcaaggggcctttgtagggccactcttctgtggacgtggactggccctgctgggggtccccagggggagtttcaggccccagacacgggcaggacctccagcccagcccctgtcttcttcctctgtggtgaactgtacataggacgctgcccgccctggcccagctgccatgggtccgatgcactggcccaagccgccatctcccgcctcatacaccagcaacctgggaagacgagacgctgcgactgttcctgcagcagagcggcccggacgcctcattccccctctgggccctgggctccatgagcaagaggctgcaggctgcttctgagatccagcctgggaactgtccaggctcctctgtcctgcctgggatggaggggccactcatcaaaccctctactccccggctgccacccacactggacagagaccaccactacctgggtcttgacgcaggtggcaccacttcttgcccaaatgccgtggcctggccccaggccccccaagcactgggtccccggcatgtggacaaggccactcaccacatctgtggctggctggaggctgccctgggcccttcctgtgaccctcagccttggaggtcagggtgccctcacacctggggatctgtgctcagccacccgatgcccgctgctccttgcttttggaggtcatccccctcccccccagtctctgcaatgtccccctgccaccctgtccaggctatgcccttcttgggctcctcctgccccatgcctgaggcacgtcccttttcgtggtttacatgacaggccagtaacaggaagggcctggggagagtttctgggctgagccacatgtgattttcctgatgggcagcactgggccacagctggggctctggttggctgtgacctcccccagggcctggctgcatcttgggtccctgtggacagagctgtgtaggctgcagatgagagttctgttctttttgggaaggagcgtgtctggccaggttctgcctttagtttgtggtgtgacctttagcagttcactcagcctgtctgggctcttggtggaaacaggtctctgaggttccttttcggccatgcttatggctccaggtcatccagcgccacagggcaggggtcctcactgagggggcgtgagccaacagccgacggctgagggcgggccgggtggagctgagttctgctgccttgcagtcgctgcgggtggagagttgcctccccactctgagcccgtgtcctcagtagtaaaatgggcagcataaggccctcctcacaggattctggcatcaagtgagatcttcagtgtaaatgaccatgtataaactgtaaagtgcaatagaaaactgtgtgtgtgaggaaagtaaggcctagagggggtgatgtgtggcacatgacagggattttgatcccacagctgcagcacggggacaggccgcttccccacatccgctcatgccactgtaagcagccctagctcttgggtccaggacctcaccaggtcctcgtcagactcctgtgctcttccaggggctgctcagccccacctgaagagcccagagaggctgtcttcctacccagcaggtctcatgcaggcccagggctggggatgcaggcaagaggagggagatggccgccctgtccctctccctagctggcggctctattctgagcagttcttgctgcccgtttgctctcaggggaaaggctcacgccccccatcttagccccaggggggtaagtgggtgctggtgatgggatggtgtggcgctcctgccgtgggtgttgccaggaggctctttgggaaggagtgtcgcccggtcaggtggtgcgctcccggtcactaggggtgtacacgtgaagttgggtgaacacctgctgctcatggtacccagtgattcttgcccgagtgggcagctgagcagaggcccctctgggtcttgcagtccaaagaaccgcagagtagcccaagggctgtgggtccattttgagtggcagccaagtctgggagcccgtgtgcatcatgtttgggtcaggttggcgtggccaccactgaaataagcaataagtacgggctcctggtacctgcggatctcctgcaaacaggcccagagaacagccttgaagccacctttcccctcaaggggactgaccctgtctttaatgctgcagtggcatccagggatcagtggaacattgctttgagaaccctcctgctgttacggaggcagcacaaagctggtgacccctgagccaacacggcactgggatggctttctaggacagaaccctgtcggcgactgtcacatctcaaactaatagctgattttaaaagccagcagcagcgacgccatgtacctgagtacaggtggcagttgcagagccgtgggctgtagaaggtcagatggggcttcccacaggggaaatctgggcatgctgtagctcagggtgactcccagctccgtcactagcagggcgacccccttccttctggagccttagctctgaaagcccccagtgggggtgccctttcagatgccccctttccatttcaaaggctctgactcttgatcttgaagccggacgcggcactggcactcggcttcagtttccactgtgacagatggaggtctcctttcgccccagcccaggtggccaagcccatcctggcctcagaacatgctgagcacattttgtagggtggcacctttttatccaagttactagctacacatcagtgtttaaagagaaaaaagtgacctttcattttttttttcttgaaacttgaggaaacaagatacatactactgattttttttttttcttaaaactaaatgcatgactgcagagcggtagaggtgtatatttttcatactgtggggcaaagtatttgtgctgctttttggagatggactggaacgtctggtttctgtccccgggcccggcagctacgtctattttctgtagaaggtgccacagtgagacctggagccaccccttcctgccctggcgccgtttagagctgggagcccgtggactcccggcctgtttctaccttctattcaaccactctgacgtggggagacaagaagaaatagaactttttgatagtgtggtaaaaacattgatttgaactattttagtaaaaggagtaacaaacaagattgtgatagtgtctactttgagctagataaataaaggcctctttgtgagcctcctggctgggtgctcagtgcttgtttctgtcgtgggtggcagggtcagcaggcagagacagggccaaggcccctcaagcaccgcagatgggggctcagtcggggccccttccacagacagagccgtggcccctcaaggtggacagtgaggccgctgctcctccagctgcctctgtctcatcacaggccagaagtggaaagggtttcaaatccaagcccccgggttcctgtgtgcgttctacgcagcaaggcttcaaagtttcaaactggtttggaactcaaccaggtcctccaaaggaaaccaaggcaggcacaggatgggggcaggctggcttggcaggcagctgtgcggatccacccagagtgccttgggaggcagtggggttggctgtggctgctgtgagctgcagccaggcctctcccgcgtccccagggtctggaaggagggcctctgcacattttataagccacagactgcgaaggcctggagccccaccttccacccataacaaagaaagggatagtttcagaactgcttttatttggataactgactgaaggagtctcatttgtaaccaagatggaattcacagtatgttgttacattcacacttaaaaaatatatctctatgtacaggaatttgcaaagagatgtaaacatacattaatttccaagtacatttctccccttctccctggaggaaaaaaaaaaagccatccaatgaggcaaccccttcaaaataattttaatacaaaggatgcaaacatctataaatgaaaaatgtggttcttctgccccttctgggtgtcatgggagagaatgtcaccgaatgaaaatgacaacagcttggcttcagatggaattggactatttaaaattgagtttccaggaaaaataggcactgatttctagaaggaaattaactccttaccgaagctatttattgagccaatatggctggttaacgtcctcactagtataaagtaacccagtgcaggactctcagacattagctgaaccaagtgtacacagtcagactgcaagggcactgatgaggctactctgaaagctggttgtccccgtcctctaggtgtgaggaccactctgattttatcccaggggcccggtccattcttcccatactgcaactgtcgtgcattatacaaggtaccctgctgcttacccacttcaactactctgcaagtcgattagaaaatcttgttaaaaaaacaaagagggaaaaaaggctcacgttatctcatccaggctgcccgccccagccccccaactggaggcatgccgggtgggggaatgggcgggggcacaggaggctgtcctccaggggggacggcaggaggtgggtagctggctggcggcaggcccaaccctggaggaggatgaggggggactgcgtgggtaggcgggaggcgtgggggtgggggtgggaagttggggttgtaggtgggtgggggtggggggtagccaggagtagggggtgggatggcaggtggggggaaggaggctgggggaggaggcacaggtggcgggggcgggttgggcgggtagacatgggggtggtagggcaggtgtgcaggtgggccgtaggcggggggcagggcaccgtaggagggtccctcggtcttcatcatggactgcaggctctggtagccctctccagacatgtaggagctggtggtggacatcccggtcatgtagctggaggggggtgggggcgggggccggtgtggcagcggcggtggctggtgcacaggggccgggtgggccggagggggaatctggactttggggaggtcagtggcatccacagggcccggcggctcagcctcacctaaggcagcagcgaggggaggcttccggtctgcaggagagagacgcatcagtgcccggcctccgccagcaatggttgctttttcagtgcctcctggcccttcagggccatctttacagaggagcagggagcagctgcccgcctcctctgtggcccaacgcatgggcc

SEQ ID NO: 818 - DNA, 323 bp, Homo sapiens
ctgcactccagcctgggcaacagagtgagagactccgtatcaaaaaaaatctccatttggaagtctaataactgacctcttgatgtccaaccctgctttgaacttgctccttttgcagctttctccatctcaattgatataactccatctttcagttgctcaagccaaaaacccagagtcctctctttctcctacataccacatctaatctgtcagcaaagcatggctgattgtaccttcaaaatatatccagaatccaatcactttttactgtttcttccactgctatcaccctgacctaagacaccatcatctggcaccta

SEQ ID NO: 819 - DNA, 415 bp, Homo sapiens
ctgcactccagcctgggcaacagagtgagagactccgtatcaaaaaaaatctccatttggaagtctaataactgacctcttgatgtccaaccctgctttgaacttgctccttttgcagctttctccatctcaattgatataactccatctttcagttgctcaagccaaaaacccagagtcctctctttctcctacataccacatctaatctgtcagcaaagcatggctgattgtaccttcaaaatatatccagaatccaatcactttttactgtttcttccactgctatcaccctgacctaagacaccatcatctggcacctagattatcataaaccagtggttctcaactgggggtgattttatccccaaggtgacatttgacaatgtccaatgcagtcctgtacactgtcaga

SEQ ID NO: 820 - DNA, 415 bp, Homo sapiens; identical to SEQ ID NO: 819

SEQ ID NO: 821 - DNA, 415 bp, Homo sapiens; identical to SEQ ID NO: 819

SEQ ID NO: 822 - DNA, 183 bp, Homo sapiens
attgagaccatccgggctaacgcggtgaaaccctgtctatactaaaaatacaaaaaattagccgggcgtggtggcaggcgcctgtagtcccagctactcgggaggctgaggcaggagaatcgcctgaacccgggaggcggaggttgcagtgagccgagaccgcgccactgcactccaggctgg

SEQ ID NO: 823 - DNA, 111 bp, Homo sapiens
aatcccagcactttgggaggccgaggcgggcggatcacttgagttcaggagttcgagaccagcctggccaacatggcaaaaccctgtctctactaaaaatacaaaaattag

SEQ ID NO: 824 - DNA, 111 bp, Homo sapiens; identical to SEQ ID NO: 823

SEQ ID NO: 825 - DNA, 194 bp, Homo sapiens
gcagtggctcatgcctgtaatccgagcactttgggaggccgaggtgggaggatcatgaggtcaggaaattgagaccatccgggctaacgcggtgaaaccctgtctatactaaaaatacaaaaaattagccgggcgtggtggcaggcgcctgtagtcccagctactcgggaggctgaggcaggagaatcgcctga

SEQ ID NO: 826 - DNA, 111 bp, Homo sapiens; identical to SEQ ID NO: 823

SEQ ID NO: 827 - DNA, 111 bp, Homo sapiens; identical to SEQ ID NO: 823

SEQ ID NO: 828 - DNA, 194 bp, Homo sapiens; identical to SEQ ID NO: 825

SEQ ID NO: 829 - DNA, 719 bp, Homo sapiens
agtaaacaaatgcccctaatgtcccaacagaatgacttactattattaaaagccaaactaaacttctcctcctataatgaagaaagtaaaaaacttccagaacagttaataaacaaagatatgtaagtgaaaataagaccaaaaagggtaaaaagaaaaagaggaggtaagtgtaaaaaataacctacatgtgaagaaggttcattttcataagtgccttagaatatgtttaagcaggccacatggaaacaaagagataaagaagcaaaatatactaagccacaatcccctccttcctgctttccctttgacccagtgtccaggagcctactggtcagggccccctcaatgacccccctccccacctcaccaaagaatttagtttgggctagcttgccatcacctaagtgcagccactagggccataagtcaaatgctcagagtcttgagacagtcgccatgcattatgggtggctgcaacaaaatgcagcaaaaaatgcagcaaaaagaccctaaagaacatacttgaagtcttaatacaactaccaataggcgatgcccaggaagactataaccccgtagtactcagctaatgaggaattggggaagggacttgcacactagggaagaaatagtttgttgaaactgtcccaggtgtacctgcactccagacacctgatcttgcaagactgtcattaaaagtctctctttcgctgttc

SEQ ID NO: 830 - DNA, 719 bp, Homo sapiens
agtaaacaaatgcccctactgtcccaacagaatgacttactattattaaaagccaaactaaacttctcctcctataatgaagaaagtaaaaaacttccagaacagttaataaacaaagatatgtaagtgaaaataagaccaaaaagggtaaaaagaaaaagaggaggtaagtgtaaaaaataacctacatgtgaagaaggttcattttcataagtgccttagaatatgtttaagcaggccacatggaaacaaagagataaagaagcaaaatatactaagccacaatcccctccttcctgctttccctttgacccagtgtccaggagcctactggtcagggccccctcaatgacccccctccccacctcatcaaagaatttagtttgggctagcttgccatcacctaagtgcagtcactagggccataagtcaaatgctcagagtcttgagacagtcgccatgtattatgggtggctgcaacaaaatgcagcaaaaaatgcagcaaaaagaccctaaagaacatacttgaagtcttaatacaactaccaataggcgatgcccaggaagactataaccccgtagtactcagctaatgaggaattgggggagggacttgcacactagggaagaaatagtttgttgaaactgtcccaggtgtacctgcactccagacacctgatcttgcaagactgtcattaaaagtctctctttcgctgttc

SEQ ID NO: 831 - DNA, 719 bp, Homo sapiens
agtaaacaaatgcccctaatgtcccaacagaatgacttactattattaaaagccaaactaaacttctcctcctataatgaagaaagtaaaaaacttccagaacagttaataaacaaagatatgtaagtgaaaataagaccaaaaagggtaaaaagaaaaagaggaggtaagtgtaaaaaataacctacatgtgaagaaggttcattttcataagtgccttagaatatgtttaagcaggccacatggaaacaaagagataaagaagcaaaatatactaagccacaatcccctccttcctgctttccctttgacccagtgtccaggagcctactggtcagggccccctcaatgacccccctccccacctcatcaaagaatttagtttgggctagcttgccatcacctaagtgcagtcactagggccataagtcaaatgctcagagtcttgagacagtcgccatgtattatgggtggctgcaacaaaatgcagcaaaaaatgcagcaaaaagaccctaaagaacatacttgaagtcttaatacaactaccaataggcgatgcccaggaagactataaccccgtagtactcagctaatgaggaattgggggagggacttgcacactagggaagaaatagtttgttgaaactgtcccaggtgtacctgcactccagacacctgatcttgcaagactgtcattaaaagtctctctttcgctgttc

SEQ ID NO: 832 - DNA, 8448 bp, Homo sapiens
tttggggcgcccccgcccgttgacagcgccccgcagcagaatgggtacgtcggcccctgcccgcccgcgcccacgccatcaggcccactgtggccccacgcccgctgcccgctgctgctcagtctgtgctgcgccccagcccggcggaaccgtgcggcagcgccccctggcggccggggtggggctgcaggcacagggcccctcccgaggctgtggcgccttgcagggcaccgccctggggaggggtctctgaatgacgccgcgccccctgctggcggctgggggttgggttgtggtgtcgggccagctgagccccagacactcagtgccgccttgtccccggctgttctgacccctccccgtctttcttcctctcctgtgtctgtccctttgtccctttatctgtctgtctgtcttatttccttcacaggtgcagacccctgacaagtcagtgagcccccctctgcctgtgcctttcttcttccttttggcactctgggtggcggcccctccccaccctggctgccctcctctccacttcgccctcctgtcctctcacctacccgcccagcagggctcctggcctcacccttacccactccctcccatcactgtaacccaaacccacatgcaccaaatcctgggaggggctgcccccaccgcccacccccagtgtggggttctgagccacaccctccccacagacagccgctccgaccgctggtcccagatgccagcaagcagcggctgatggagaacacagaggactggcggccgcggccggggacaggccagtcgcgttccttccgcatccttgcccacctcacaggcaccgagttcagtaagtgccagcccagggcagggggtactttcctcgcccccagcccaggcgtgatccctgaccctgtgtcttttttggtcaatgcctgcctctgccctctcagtgcaagacccggatgaggagcacctgaagaaatcaaggtacagggacgggcaccagcccctctcccacctcctgcctcttccattccagctactgccctgtgtctactcctgaggctcccagctggggctctcaattctcccttccttccttccttccttccttccttccttccttccttccttcccttcctccttccttccttctttcatttcttccctccctccttccttccctcctccctccctgcctcccttccatctctccttccttccacttcttcctccctctctctctgcccctcagggaaaagtatgtcctggagctgcagagcccacgctacacccgcctccgggactggcaccaccagcgctctgcccacgtgctcaacgtgcagtcgtagcccggccctctccagccggctgccctctctgcctccctctttctgttcctcctgcccagggcacccccttagtgcctccagcttctgcctacctcaccccccctttcgtgcccctggcctgagcctcctgctggcctggccctggccgcccacctgggttcatctgacactgccttccctctttgccctgtggtactgctgtctgccaggtctgtgctgccttgggcatggaataaacattctcagccctgcttgctctgcctgtcttctatctttgtggacctggtttgcatttggggtgtgggggtgtttcgtggttcggactgtttgggccctgccgtcctcgttttcagtgggagggggtacctggcaaaggggccctgccctgccatcacagatggcttcctggcatgaggggagccccaggagctgcctcagaagcgggagccctgcctcgtctcccagctagagaccgcacaccagctaactggacattgctaggagaagctgcccttcccatccctaccccagtgggacctggaatccaactcggcagtttccacgcccccagtcatctcccgtggggccagcaggacccaggttggggggtggggccatgtcaggaagctcagccatgcagggccttgaatggcagatcttgcagccaggtgcccaggacagaagccccagccccagcctcatctacaccccaggagccctggcctggtgagagggagtgggctcgggcctgggcaagggtgggcagcctccaggggcatgggggtggtgggcttctctcagctgcctggggctccacccccgtcctttggggtccctgggcacccctttagagtcactttccccggcaggccctaccgcccccagccctaccagccgcccgccctgggctgtggaccctgcgtttgccgagcgctatgccccggacaaaacgagcacagtgctgacccggcacagccagccagccacgcccacgccgctgcagagccgcacctccattgtgcaggcagctgccggaggggtgccaggagggggcagcaacaacggcaagactcccgtgtgtcaccagtgccacaaggtcatccggtgggtggcctgttcctgtccgaccctggctttcccatcctgcagcccagccccacctgtctgcccacctgtcttgcctcagctgcgactggggggaataaggattcagttctcagctggagtaggagtagggacctgggctgggtcctcccattcttaatcccacgctacctaccccagcccacccacaacaactgctagcagcatctgccgtggcgaaatagccgaagggccaaccataggctgaagctgcaccccctacctttgctgctctctgggcaaagaggggcctgccccctcccagcgcgtctgcccctccctcctgctctctgtctccctctgctctcagagcatacaggcctggagccactccctctgtgcactgccccgtggggccaagcagcatcaaacaccccccagcatcagcgtgccggattctagagccttcctaattcgcaggcctggcctgctctcatctctgtcagctcttttttttttttttttgaaacagagtctcactgtgttgcccacgttggcgtgcagtggcgcgatctcggctcactgcaacctctgcctcctgggttcaagagattctcctgcctcagcctcctgagtagctgggattacaggcacccgccaccatgcctggctaattttgtatttttagtagagacggggttttaccatgttggccaggctggtctcaaactcctcacctcaggtgatctcaggcctgccttggcctcccaaagtgctgggactacaggtgtgagccactgtgcccagccgactctatcagctcttgccaggtagaacaggcaggccagcaggacagggcagctccagggtttgcccaggggcggctcagcttttatgaggctccagtcgtcagcccttcctcccggggtcctccctgctctaaagctgcctctcctgtcaccagcagttcagtgtggcggactggctctgtaagcttcacggctgccacggtcacttcccaagcctgtcttctatcctatgtggaaaatggggagaatgaactgtccctcccaaggcctcctggtgggtggtcagtcaacctgaagggggccaagacccccacctctctgcgtgtgctccctctgaccgctctcgcctccctgcaggggccgctacctggtggcgctgggccacgcgtaccacccggaggagtttgtgtgtagccagtgtgggaaggtcctggaagagggtggcttctttgaggagaagggcgccatcttctgcccaccatgctatgacgtgcgctatgcacccagctgtgccaagtgcaagaagaagattacaggcgtgagtagggctggctggcggggaggtggtcccaagcctgtcagtgggaacgagggctgctgggaaacccacagtccaggtctctccccgagtgagccctccgggtccttaccagcgtaataaatgggctgctgtactggcctcaccctgcattagtcaggatgctcttaacaaatgaccatgttcctgctcagaaaccgcccaaggctgcaaagagcaggaggaccaagccaggagaagccctgggccctcctgactcccactttgggctctccctgccctggtgaaatgacagaacggccaacttgacacgctgaagctgctctgtctcatgcgtcctcctcatttctggatccagagccagggctgccaggagtagccagagagctctgtgtggtgatgttcatattagtgaggtttaccttgaccacgagcagtgggaaactcaaaataatggtggcttatttctcatctaaaaacatcccggggtgggtggtctgggactgatctggtggacccaggctccgccttgttgcttgactgttggcagcacctgcttacttaccactcatggtgcaagatgacacttcagcctccgccaaaatgctcaccttccagccagcaggaagtcggaaggagaagaaaggggacagagccccatggcgtccatccttagaggatgctgccacctgaacctctgctttcatcctgttggtcagaacccagtcacatgaccacacccagtggcaacggaggctgggaaatatagtctttattttgggcacccatgtgtccagcaaaactgggggttccatcagtcggcaagaacgggagagtggccgatgcagtggctgatgcttgtatcccagcactttgggaggtcgaggtgggcagatcacctgaggtcaggagttcaagaccagcctggccaatatggtgaaaccctgtctctactaaaaataaaaaaattagctgggtgtgctggcgcacctgtagtcccagctacttgggaggctgaggcaggagaatcgcttgatcttgagaggtggaggttgcagtgagccaagattgtgccactgccttccagcctgggagacagcaaaaaaaaaaaaaaaaaaaaaaaaaaaaaaaagggccaggcacggtggctcacacctgtaatcccagcactttgggaggccgagatgggcggatcacgaggtcaggagattgagaccatcctggctaacacggtgaaaccccatctctactaaaaatacaaaaaaattggccgggcatggtggagtagtcccagctactcgggaggctgaggcaggagaatggcgtgaacctgggaggcagagcttgcagtgagccgagatcgcgccactgcactccagcctgggcgacagagcgagactcttgtctcaaaaagaaaaaaagaaagagaaatctgcctcccagccttgggctcctgccccaccagcccacacccctggtagagccccctctcccaccagctcaaagcccaagttccttcactgtgaccttgtctgctcctctaaaacaggcaacaccagacagtgagaagagccagccagacatgggcagaaaacctatttctgtgatctactggctgtgtgagcagggggctagttgctctctctgggcctcactgaagagaagggtggcactatgctagggccggcacggttgcaaggtagatgtaagatggggtacaggtgttgtggagggcagaaatgcaccatccgaaggctacatgtcccccacacttatgtcttgcttggcccacactgtttcattttaaaatcagtagcaaacaatttaaaaaatcagaagatttgcctgcatgatgcagtggctcatgcctgtaatcccagcactttgggaggccaaggtgggaggattgcttgagcccaggagttcaagaccagcatgggcaccatagcaagacccctgtttctacaaaaaaaaaaaaattagaaaattagccaagtgtggtggcatgcacctgtggtcccagctacttgggaggcagagggaaagtgagatctcctgctttttatttctttatgtataatgatagggtcttgctctgttgcccaggctggagtgcagtggcatgatcactgctcactgcagccttgatctcctgggctcagaggatcctcccacctcagcctcccaaatagctaggactagaggtgcccaccagcatgctcagcagatttttaaatctttttgtagagatgaggttttgctatgttgcccaggctggtctcgaactcctggcctcgagcgatcctcccaccttggcctcccaaagcactgggattacagacgtgagccactgcgcccagcagatttctctttaacacctagatttcagcctgagccaggcaggcattcctgaatgaaccagtagtactgctcccagaagaagaggtcctcctccgtgtgacacagtccccacttggcccttgcagggattggatctgggatccctggatttaaactcagggccatcctcataacagcctcacaaggctgggattagcttcccagttcacaagggaagaaaccaagacttgagaaggtcaaggtctggccagacccacacatcttggaccctcataccgcctcgaggccccatgctgccctctgcctgctccagatgtgaatactgctggccctggctggccccggctggccccgagggtcctagggatgaacagcccagcccagggagagctcagccccttgtgcctctgccccttcccacctcctgtggaggccagtcgactcacccacaaagggccaggcactgtggggatagatcagctaacaaaacagttgatgcttcctgcccttctgggccttacattttggctggaagaagaggggagaggcagactgtaagcaataagcgcaataagtaggttgcctggaagtaatgttagatcacgttacggaaaacaggaaagagcagagcaacaagtgctggggtgcgtggtgcagggaaggcagctggctgctgctggtgtggtcagagtgggccctcatggagaagactgcattcgagcagaaacttgaagggggtgaggggtgagcctagagatatctggggcagagcagtccaggcagaggggacagccggtgtcaagcccaggacaggagtgtgcctggtgtgccagtttcaggcaagaggccagtgtgcagaggcaaggtgagaacgcaagggagagcagtggcggagacgggtgggaacgaggtcagacctgctggcctccagcctctgcatggggcttggctcttgctgggagcaatgggaagcagtacacagtttcatgcagggggagaaggcctgtcttgggttgcaggggcccgctgtggcagctgggatcagagagaggagcttgtaggccagttgttatgtggtcccacgggccagatggccatggcttacctcacttcagggaggctgtgagaagcactcagaatctggatgtgccttgggggtgggccccactggatttcctggtggacctggtgtggggtgtgagaggagggtgtgtttggctgcagcagacaggagaatggagttgccatccgcgtgatggggatggctgtgggaggagaggtttggggtgagggaatcaggaactgagtgctggacatggcaagtctgaaggcgcagtggtcgtccactcagagaccttggagttggagatggaggtgtgggagtcctgaacagttagatgtagtgtttaccgcgagaaggaacagggcttgcggccagccctcctgtgttcccgtgacccagggcagggcaggaggggcctgagcctgccgagtgactgggacctccttccaggagatcatgcacgccctgaagatgacctggcacgtgcactgctttacctgtgctgcctgcaagacgcccatccggaacagggccttctacatggaggagggcgtgccctattgcgagcgaggtacccactggccagtgagggtgaggagggatggtgcatggggcaggcatgaatccaggtcctctttctctctgcccccattctcagactatgagaagatgtttggcacgaaatgccatggctgtgacttcaagatcgacgctggggaccgcttcctggaggccctgggcttcagctggcatgacacctgcttcgtctgtgcggtgagagccccgcccctcgaactgagccccaagcccaccggccctctgttcattccccaggagatgcaggagaagttgggaaggggcctctcctgctgcccccaaccccatgtgactgggcctttgctgtccttagatatgtcagatcaacctggaaggaaagaccttctactccaagaaggacaggcctctctgcaagagccatgccttctctcatgtgtgagccccttctgcccacagctgccgcggtggcccctagcctgaggggcctggagtcgtggccctgcatttctgggtagggctggcaatggttgccttaaccctggctcctggcccgagcctggggctccctgggccctgtgcccacccaccttatcctcccaccccactccctccaccaccacagcacaccggtgctggccacaccagccccctttcacctccagtgccacaataaacctgtacccagctgtg

SEQ ID NO: 833 - DNA, 14221 bp, Homo sapiens
agaacactggcggccgatcccaacgaggctccctggagcccgacgcagagcagcgccctggccgggccaagcaggtatcgacgaccgcgcggggcgtcttgggctggaccaggcgggcgcccggggcctgctgaggaccacaaagggcactgggggtcgtggtccaggctgtgcttcctcccgctggccctggcccctgcctccgcccccgcccccgccttcctgccgctaagccggctgcggcggggccgattggcgcctgccggcttcctgcgccggggccagtctaatgcatggggcccgggcgggggactaaggggaaactgagtcacgtcggtgtgggagcagttctgtgtgggaggcaccaccccccactgggctcggggaaggatccccctccaagctatgcttgagggtcccagcccccatctgtctccacaggggccgcaccccactcccgccttccccttcttcagcacccaggggtcccgccctggctcccagcagcctcgactggtcccggaatggctaggaggatccgctgcagccgcctccctcccctcccctcccctcccctcccctcccctcccctcccctcccctcccctccccctcgcgtcccaagcccccgtgtgctccctccgctggctctccgcacagtgtcagcttacacgccttatatagtccgagcaggctccagccgcggcctgctgccgggacctgggggcgggggagaggagagccggcccctgactcacccggccgcccgaggctccaggctggcttggggggaggccgcgccagtttagtccctcggcccacccctggttgcaaagaacctcaagcctggattcaggcacccctcaccgttccagtcccaaggggaggggggctgctcctgtctttccaaagtgaggtccgccagccagcagcccaggccagcctgacaaaatacctgcctcctatggcttgggcgtgctcaggggctgcccgtgcctgcctggcccctgtccaaggctggtatcctgagctggcccggcctgcctgcctgcccgcccaccatgctggccactcaccttctcttctctcctctcaggagccggcatcatggattccttcaaagtagtgctggaggggccagcaccttggggcttccggctgcaagggggcaaggacttcaatgtgcccctctccatttcccgggtgagcctaggtttggggagggggctcccccagcggtctttcggtgcttaggtctccagagggtgatggggggagtcctaacaggagctggtcaggggccagcaggccaggagatgtctaggtccggagatgtagtggtacctgcctgccacaaggactcccaatgaggtggatactgggagggagcacccaggcttctccagccctgcactgtacccgatgctgttctcccaagctcctgtggccacctctgagggctggagggaggctcattgtgcaggatgggagcctaacatttcaggaggtatctaaacttgaggtggcaatgcttggagccaggccccaggcaggacactgtgactataggatttcacttcagcctcactgccgcccagggaatagcaatcctcatcccgtttttccagatgagagaagaactcatggagaggtggcggggctcgctcatcgagtccatggtgaagcagggattggaattgaggcacagcatggcgtacattttttgtgggtagaaggggtctctccccagcctatgtaaggacccacatccactgttcccattcaggatgtggtggcctttgaccccaagcagaagtgtaggacagggctccattctaggggcttaacttcagcttccaagagcctgccctggtgtgggtggagctggaggctggctcctccctgtagcagggggattgccttataagcccaagaatgcagccccacgctgggatggccaacagtggctgcggtctgcagagctgaaaagggctggcctaggcctggccccctgaaccccactggtgggcctctcagctggtcaccaggctgcagctccagctgtatggtccagttgtgagacacaacaaattgcctgcccagagtgggtgaggccagcctgtcggctggcatctctgactggcctgggggtcaggagggggtggggacttcctgcccctatatccgcctgccccgagagacccacccaggcgccgggtgggcaggcagctgttgtcaggaagcccaaggcaagcccagcctggaggggcccagagggtcgtggcctgaggaggggctcaagctggagtctgtctgtaggagctgggcgtgggggttagggtgggcaggccagcagtgctcttctcaggggtcctttgatggcattctcctggaacctgccccgccagcagggtagtgaggcagtggttgccctatgacacacgtcccactacatagccctcacacagccctgaaacctacctgacgtcctgctccctgggaaagtgctggcccagtgtgtctggggagcctgaacctcagtttcttccctgatggagatgactttcagatatggcctgttgggggcactccgggctccagctccctggtcagcatccctggcatgtgggcggggccactagctgatcccagccctggagttggacctgggcccacatgggtgggtgaggtgggcttttctgagttaggccagccccctccccctcccctgaccccagaatggagggaggtgggaggggcaagggctggctgtgggcccaggcctgggagatgaggtaacgtctgggactggggggctgggctgctcaggctgactcacccccacctcatgcagggtccagccccctggctttttccctccttggttcctctggccttaccctgcccctggcttgagcccctccctgcctctctccagccacccgcccagcgctgtcttctgctctcctgctgccctccccacgctctgaacacccctcatcctctgtgcttcctgccctcctcactctgggaagggaagccgtccccgccccccaccccctctccaggagccagctagctgcaccccaagacccccacctcgggctcagcccacagctcccaggagccagccctgtgggcagggagtggctgggccaggtttcccttctactgactcaccatgaccttgagtaagtcacttcccctctggggtgtcacttccccatacacagtataaggggttgatttagttggattgaactaaaggtgagggagtggctcagggtgtctccaggtgggctgacccctcagttgggcccccatgctcagcagaggtggcccacagtggtggagccttagggtcagagacacttcctggctctgcctcttactagctgggtgacttgaggcaagttgtttaacctctctgtgtacatttgcaagtgcaaaatgggtaaaatcccagattactccacaaggttgttggaagattcagtgtcaatatgtagcatagttggtgctcaataaactgaagcaagtcttcttatttagcgagtgaggaaggggccgccgagctctcttagccttctgacctcctacgcaagcaagaggtcatgttgagcccagctcgcctttcttttcccagtgctgtcaagctctgtgcctggctgccctgccctctgacatctctctgaaacctcttgcctcccctctccctgcctcagctcagtctgtgcactgacccacctgaggagcctcctggggccactggcagcctggacccccccagatcccccccacccagtgaaattgtcttccagcactgcctcacaaaagcctacttgatgcagtgccaggcctcttgccagatggctgggtggtcccttaggcttggacccagtcaagctgccctgcctgtgttgctggggctgggctagaggcctggaaggggtttatcagggtcaccctctcagggcctgggagatacccaatcccagacattaaaactgccagtagcccctctaccttcaaagccaagtcctggtcccttcccctggcattcaaagccatcgtaagtgaactctcacccgctaggcagcacacgccattctcctttaccgaggcccaccgcttcctcaaagtcattcctgatggtctcagctcatgctggtggcagccatttctcccagcctactgtctctactcattgccacaggaaccagggactcccagctcaagagcctgaaggattggggtcaggggaaattggcagtcgagggcttgggagtgacagccatgtatggcctacgaagtcccagctgtcaacttaggtcccattcaggcagtgttcacagggaaccgggagataacagggcctgttcctggctctcaaagggtcccagcagacccctatagatggcccccgacagggtgctggggggtgagaggtccataagagcccccggtggtttcggggaggaagctgccccctgcatgggccagagggcatatctggtaggtggagtggcctgggcaggaggccagcaggagcctcaaaaggcaatggtcctcctgaaacacttgggctttagcctgagcgtggctgtttgtggacatcatagcaatttctggactgtgggggagggtggtggcggtgaatagataagcatcgtgactggggaagctcaggtgagcaccacctgagggagagggtctggcagtgaataaataagcagtgtgactgggaaattgtgaagctcaggtgagcgccaccacctcctgggttgctttagtgtccagcagctgcctagaactatgttgaatgaagagctctctgggttctggaagtgggacagctttgggtggggcagtgttaccaccgtcagcctggcttgggtctgcagggtccagggcctcggtcactttgcttctctctccacagctcactcctgggggcaaagcggcgcaggccggagtggccgtgggtgactgggtgctgagcatcgatggcgagaatgcgggtagcctcacacacatcgaagctcagaacaagatccgggcctgcggggagcgcctcagcctgggcctcagcaggtatgcgggtggacatggatgggtgcgcccgcgctggcagtggggatccctgcggcccggcccgctgtcacgctttccttctcctccagggcccagccggttcagagcaaaccgcagaaggtacgaggctggccgggacatccgggcggtgggcggtgtgggcttggacggccaggcctgctcgccctcctggcacattctcggtaccccaatccctggccgggagtggagggcagaaaccggagctaaggcgggtctagggccctggagttgagccaggggctgctgcacggtcctggcaccacgcatgtccgcctgtctgtccgcctgtctgtccgcctgctgcctcccgccgccggcgctgcgtgctcgcccgcactcggtcagccctcggtcctgcgtggactgagatcgccactcccaaatgggccccttgaaacctgagtcgtcctctccccgtagcctccaaatagatgtagggggtggggtgggggtggggggctggagctgccgctgtcctctgctgcaggcgccccacttccacccaggcccccaccttaccctgcccgcccgccctgcccggctgtgtctctgcccaggcctccgcccccgccgcggaccctccgcggtacacctttgcacccagcgtctccctcaacaagacggcccggcctttgggcgcccccgcccgctgacagcgccccgcagcagaatgggtacgtcggcccctgcccgcccgcgcccacgccatcaggcccactgtggccccacgcccgctgcccgctgctgctcagtctgtgctgcgccccagcccggcggaaccgtgcggcacgccccctggcggccggggtggggctgcaggcacagggcccctcccgaggctgtggcgccttgcagggcaccgcctggggaggggtctctgaatgacgccgcgccccctgctggcggctgggggttgggttgtggtgtcgggccagctgagccccagacactcagtgccgccttgtccccggctgttctgacccctccccgtctttcttcctctcctgtgtctgtccctttgtccctttatctgtctgtctgtcttatttccttcacaggtgcagacccctgacaagtcagtgagcccccctctgcctgtgcctttcttcttccttttggcactctgggtggcggcccctccccaccctggctgccctcctctccacttcgccctcctgtcctctcacctacccgcccagcagggctcctggcctcacccttacccactccctcccatcactgtaacccaaacccacatgcaccaaatcctgggaggggctgcccccaccgcccacccccagtgtggggttctgagccacaccctccccacagacagccgctccgaccgctggtcccagatgccagcaagcagcggctgatggagaacacagaggactggcggccgcggccggggacaggccagtcgcgttccttccgcatccttgcccacctcacaggcaccgagttcagtaagtgccagcccagggcagggggtactttcctcgcccccagcccaggcgtgatccctgaccctgtgtcttttttggtcaatgcctgcctctgctctctcagtgcaagacccggatgaggagcacctgaagaaatcaaggtacagggacgggcaccagcccctctcccacctcctgcctcttccattccagctactgccctgtgtctactcctgaggctcccagctggggctctcaattctcccttccttccttccttccttccttccttccttccttccttccttccttccttccttccttcccttcctccttccttccttctttcatttcttccctccctccttccttccctcctccctccctgcctcccttccatctctccttccttccacttcttcctccctctctctctgcccctcagggaaaagtatgtcctggagctgcagagcccacgctacacccgcctccgggactggcaccaccagcgctctgcccacgtgctcaacgtgcagtcgtagcccggccctctccagccggctgccctctctgcctccctctttctgttcctcctgcccagggcacccccttagtgcctccagcttctgcctacctcaccccccctttcgtgcccctggcctgagcctcctgctggcctggccctggccgcccacctgggttcatctgacactgccttccctctttgccctgtggtactgctgtctgccaggtctgtgctgccttgggcatggaataaacattctcagccctgcttgctctgcctgtcttctatctttgtggacctggtttgcatttggggtgtgggggtgtttcgtggttcggactgtttgggccctgccgtccttgttttcagtgggagggggtacctggcaaaggggccctgccctgccatcacagatggcttcctggcatgaggggagccccaggagctgcctcagaagcgggagccctgcctcgtctcccagctagagaccgcacaccagctaactggacattgctaggagaagctgcccttcccatccctaccccagtgggacctggaatccaactcggcagtttccacgcccccagtcatctcccgtggggccagcaggacccaggttggggggtggggccatgtcaggaagctcagccatgcagggccttgaatggcagatcttgcagccaggtgcccaggacagaagccccagccccagcctcatctacaccccaggagccctggcctggtgagagggagtgggctcgggcctgggcaagggtgggcagcctccaggggcatgggggtggtgggcttctctcagctgcctggggctccacccccgtcctttggggtccctgggcacccctttagagtcactttccccggcaggccctaccgcccccagccctaccagccgcccgccctgggctgtggaccctgcgtttgccgagcgctatgccccggacaaaacgagcacagtgctgacccggcacagccagccggccacgcccacgccgctgcagagccgcacctccattgtgcaggcagctgccggaggggtgccaggagggggcagcaacaacggcaagactcccgtgtgtcaccagtgccacaaggtcatccggtgggtggcctgttcctgtccgaccctggctttcccatcctgcagcccagccccacctgtctgcccacctgtcttgcctcagctgcgactggggggaataaggattcagttctcagctggagtaggagtagggacctgggctgggtcctcccattcttaatcccacgctacctaccccagcccacccacaacaactgctagcagcatctgccgtggcgaaatagccgaagggccaaccataggctgaagctgcacccctacctttgctgctctctgggcaaagaggggcctgccccctcccagcgcgtctgcccctccctcctgctctctgtctccctctgctctcagagcatacaggcctggagccactccctctgtgcactgccccgtggggccaagcagcatcaaacaccccccagcatcagcgtgccggattctagagccttcctaattcgcaggcctggcctgctctcatctctgtcagctcttttttttttttttttgaaacagagtctcactgtgttgcccacgttggcgtgcagtggcgcgatctcggctcactgcaacctctgcctcctgggttcaagagattctcctgcctcagcctcctgagtagctgggattacaggcacccgccaccatgcctggctaattttgtatttttagtagagacggggttttaccatgttggccaggctggtctcaaactcctcacctcaggtgatctcaggcctgccttggcctcccaaagtgctgggactacaggtgtgagccactgtgcccagccgactctatcagctcttgccaggtagaacaggcaggccagcaggacagggcagctccagggtttgcccaggggcggctcagcttttatgaggctccagtcgtcagcccttcctcccggggtcctccctgctctaaagctgcctctcctgtcaccagcagttcagtgtggcggactggctctgtaagcttcatggctgccacggtcacttcccaagcctgtcttctatcctatgtggaaaatggggagaatgaactgtccctcccaaggcctcctggtgggtggtcagtcaacctgaagggggccaagacccccacctctctgcgtgtgctccctctgaccgctctcgcctccctgcaggggccgctacctggtggcgctgggccacgcgtaccacccggaggagtttgtgtgtagccagtgtgggaaggtcctggaagagggtggcttctttgaggagaagggcgccatcttctgcccaccatgctatgacgtgcgctatgcacccagctgtgccaagtgcaagaagaagattacaggcgtgagtagggctggctggcggggaggtggtcccaagcctgtcagtgggaacgagggctgctgggaaacccacagtccaggtctctccccgagtgagccctccgggtccttaccagcgtaataaatgggctgctgtactggcctcaccctgcattagtcaggatgctcttaacaaatgaccatgttcctgctcagaaaccgcccaaggctgcaaagagcaggaggaccaagccaggagaagccctgggccctcctgactcccactttgggctctccctgccctggtgaaatgacagaacggccaacttgacacgctgaagctgctctgtctcatgcgtcctcctcatttctggatccagagccagggctgccaggagtagccagagagctctgtgtggtgatgttcatattagtgaggtttaccttgaccacgagcagtgggaaactcaaaataatggtggcttatttctcatctaaaaacatcccggggtgggtggtctgggactgatctggtggacccaggctccgccttgttgcttgactgttggcagcacctgcttacttaccactcatggtgcaagatgacacttcagcctccgccaaaatgctcaccttccagccagcaggaagtcggaaggagaagaaaggggacagagccccatggcgtccatccttagaggatgctgccacctgaacctctgctttcatcctgttggtcagaacccagtcacatgaccacacccagtggcaacggaggctgggaaatatagtctttattttgggcacccatgtgtccagcaaaactgggggttccatcagtcggcaagaacgggagagtggccgatgcagtggctgatgcttgtatcccagcactttgggaggtcgaggtgggcagatcacctgaggtcaggagttcaagaccagcctggccaatatggtgaaaccctgtctctactaaaaataaaaaaattagctgggtgtgctggcgcacctgtagtcccagctacttgggaggctgaggcaggagaatcgcttgatcttgagaggtggaggttgcagtgagccaagattgtgccactgccttccagcctgggagacagcaaaaaaaaaaaaaaaaaaaaaaaaaaaaagggccaggcacggtggctcacacctgtaatcccagcactttgggaggccgagatgggcggatcacgaggtcaggagattgagaccatcctggctaacacggtgaaaccccatctctactaaaaatacaaaaaaattggccgggcatggtggagtagtcccagctactcgggaggctgaggcaggagaatggcgtgaacctgggaggcagagcttgcagtgagccgagatcgcgccactgcactccagcctgggcaacagagcgagactcttgtctcaaaaagaaaaaaagaaagagaaatctgcctcccagccttgggctcctgccctaccagcccacacccctggtagagcctcctctcccaccagctcaaagcccaagttccttcactgtgaccttgtctgctcctctaaaacaggcaacaccagacagtgagaagagccagccagacatgggcagaaaacctatttctgtgatctactggctgtgtgagcaggggctagttgctctctctgggcctcactgaagagaagggtggcactatgctagggccggcacggttgcaaggtagatgtaagatggggtacaggtgttgtggagggcagaaatgcaccatccgaaggctacatgtcccccacacttatgtcttgcttggcccacactgtttcattttaaaatcagtagcaaacaatttaaaaaatcagaagatttgcctgcatgatgcagtggctcatgcctgtaatcccagcactttgggaggccaaggtgggaggattgcttgagcccaggagttcaagaccagcatgggcaccatagcaagacccctgtttctacaaaaaaaaaaaaattagaaaattagccaagtgtggtggcatgcacctgtggtcccagctacttgggaggcagagggaaagtgagatctcctgctttttatttctttatgtataatgatagggtcttgctctgttgcccaggctggagtgcagtggcatgatcactgctcactgcagccttgatctcctgggctcagaggatcctcccacctcagcctcccaaatagctaggactagaggtgcccaccagcatgctcagcagatttttaaatctttttgtagagatgaggttttgctatgttgcccaggctggtctcgaactcctggcctcgagcgatcctcccaccttggcctcccaaagcactgggattacagacgtgagccactgcgcccagcagatttctctttaacacctagatttcagcctgagccaggcaggcattcctgaatgaaccagtagtactgctcccagaagaagaggtcctcctccgtgtgacacagtccccacttggcccttgcagggattggatctgggatccctggatttaaactcagggccatcctcataacagcctcacaaggctgggattagcttcccagttcacaagggaagaaaccaagacttgagaaggtcaaggtctggccagacccacacatcttggaccctcataccgcctcgaggccccatgctgccctctgcctgctccagatgtgaatactgctggccctggctggccccggctggccccgagggtcctagggatgaacagcccagcccagggagagctcagccccttgtgcctctgccccttcccacctcctgcggaggccagtcgactcacccacaaagggccaggcactgtggggatagatcagctaacaaaacagttgatgcttcctgcccttctgggccttacattttggctggaagaagaggggagaggcagactgtaagcaataagcgcaataagtaggttgcctggaagtaatgttagatcacgttacggaaaacaggaaagagcagagcgacaagtgctggggtgcgtggtgcagggaaggcagctggctgctgctggtgtggtcagagtgggccctcatggagaagactgcattcgagcagaaacttgaagggggtgaggggtgagcctagagatatctggggcagagcagtccaggcagaggggacagccggtgtcaagcccaggacaggagtgtgcctggtgtgccagtttcaggcaagaggccagtgtgcagaggcaaggtgagaacgcaagggagagcagtggcggagacgggtgggaacgaggtcagacctgctggcctccagcctctgcatggggcttggctcttgctgggagcaatgggaagcagtacacagtttcatgcagggggagaaggcctgtcttgggttgcaggggcacgctgtggcagctgggatcagagagaggagcttgtaggccagttgttatgtggtcccacgggccagatggccatggcttacctcacttcagggaggctgtgagaagcactcagaatctggatgtgccttgggggtgggccccactggatttcctggtggacctggtgtggggtgtgagaggagggtgtgtttggctgcagcagacaggagaatggagttgccatccgcgtgatggggatggctgtgggaggagaggtttggggtgagggaatcaggaactgagtgctggacatggcaagtctgaaggcgcagtggtcgtccactcagagaccttggagttggagatggaggtgtgggagtcctgaacagttagatgtagtgtttaccgcgagaaggaacagggcttgcggccagccctcctgtgttcccgtgacccagggcagggcaggaggggcctgagcctgccgagtgactgggacctccttccaggagatcatgcacgccctgaagatgacctggcacgtgcactgctttacctgtgctgcctgcaagacgcccatccggaacagggccttctacatggaggagggcgtgccctattgcgagcgaggtacccactggccagtgagggtgaggagggatggtgcatggggcaggcatgaatccaggtcctctttctctctgcccccattctcagactatgagaagatgtttggcacgaaatgccatggctgtgacttcaagatcgacgctggggaccgcttcctggaggccctgggcttcagctggcatgacacctgcttcgtctgtgcggtgagagccccgcccctcgaactgagccccaagcccaccggccctctgttcattccccaggagatgcaggagaagttgggaaggggcctctcctgctgcccccaaccccatgtgactgggcctttgctgtccttagatatgtcagatcaacctggaaggaaagaccttctactccaagaaggacaggcctctctgcaagagccatgccttctctcatgtgtgagccccttctgcccacagctgccgcggtggcccctagcctgaggggcctggagtcgtggccctgcatttctgggtagggctggcaatggttgccttaaccctggctcctggcccgagcctggggctccctgggccctgccccacccaccttatcctcccaccccactccctccaccaccacagcacaccgatgctggccacaccagccccctttcacctccagtgccacaataaacctgtacccagctgtg

SEQ ID NO: 834 - DNA, 9566 bp, Homo sapiens
tggcggtgaatagataagcatcgtgactggggaagctcaggtgagcaccacctgagggagagggtctggcagtgaataaataagcagtgtgactgggaaattgtgaagctcaggtgagcgccaccacctcctgggttgctttagtgtccagcagctgcctagaactatgttgaatgaagagctctctgggttctggaagtgggacagctttgggtggggcagtgttaccaccgtcagcctggcttgggtctgcagggtccagggcctcggtcactttgcttctctctccacagctcactcctgggggcaaagcggcgcaggccggagtggccgtgggtgactgggtgctgagcatcgatggcgagaatgcgggtagcctcacacacatcgaagctcagaacaagatccgggcctgcggggagcgcctcagcctgggcctcagcaggtatgcgggtggacatggatgggtgcgcccgcgctggcagtggggatccctgcgggcccggcccgctgtcacgctttccttctcctccagggcccagccggttcagagcaaaccgcagaaggtacgaggctggccgggacatccgggcggtgggcggtgtgggcttggacggccaggcctgctcgccctcctggcacattctcggtaccccaatccctggccgggagtggagggcagaaaccggagctaaggcgggtctagggccctggagttgagccaggggctgctgcacggtcctggcaccacgcatgtccgcctgtctgtccgcctgtctgtccgcctgctgcctcccgccgccggcgctgcgtgctcgcccgcactcggtcagccctcggtcctgcgtggactgagatcgccactcccaaatgggccccttgaaacctgagtcgtcctctccccgtagcctccaaatagatgtagggggtggggtgggggtggggggctggagctgccgctgtcctctgctgcaggcgccccacttccacccaggcccccaccttaccctgcccgcccgccctgcccggctgtgtctctgcccaggcctccgcccccgccgcggaccctccgcggtacacctttgcacccagcgtctccctcaacaagacggcccggccctttggggcgcccccgcccgctgacagcgccccgcagcagaatgggtacgtcggcccctgcccgcccgcgcccacgccatcaggcccactgtggccccacgcccgctgcccgctgctgctcagtctgtgctgcgccccagcccggcggaaccgtgcggcagcgccccctggcggccggggtggggctgcaggcacagggcccctcccgaggctgtggcgccttgcagggcaccgccctggggaggggtctctgaatgacgccgcgccccctgctggcggctgggggttgggttgtggtgtcgggccagctgagccccagacactcagtgccgccttgtccccggctgttctgacccctccccgtctttcttcctctcctgtgtctgtccctttgtccctttatctgtctgtctgtcttatttccttcacaggtgcagacccctgacaagtcagtgagcccccctctgcctgtgcctttcttcttccttttggcactctgggtggcggcccctccccaccctggctgccctcctctccacttcgccctcctgtcctctcacctacccgcccagcagggctcctggcctcacccttacccactccctcccatcactgtaacccaaacccacatgcaccaaatcctgggaggggctgcccccaccgcccacccccagtgtggggttctgagccacaccctccccacagacagccgctccgaccgctggtcccagatgccagcaagcagcggctgatggagaacacagaggactggcggccgcggccggggacaggccagtcgcgttccttccgcatccttgcccacctcacaggcaccgagttcagtaagtgccagcccagggcagggggtactttcctcgcccccagcccaggcgtgatccctgaccctgtgtcttttttggtcaatgcctgcctctgccctctcagtgcaagacccggatgaggagcacctgaagaaatcaaggtacagggacgggcaccagcccctctcccacctcctgcctcttccattccagctactgccctgtgtctactcctgaggctcccagctggggctctcaattctcccttccttccttccttccttccttccttccttccttccttccttcccttcctccttccttccttctttcatttcttccctccctccttccttccctcctccctccctgcctcccttccatctctccttccttccacttcttcctccctctctctctgcccctcagggaaaagtatgtcctggagctgcagagcccacgctacacccgcctccgggactggcaccaccagcgctctgcccacgtgctcaacgtgcagtcgtagcccggccctctccagccggctgccctctctgcctccctctttctgttcctcctgcccagggcacccccttagtgcctccagcttctgcctacctcaccccccctttcgtgcccctggcctgagcctcctgctggcctggccctggccgcccacctgggttcatctgacactgccttccctctttgccctgtggtactgctgtctgccaggtctgtgctgccttgggcatggaataaacattctcagccctgcttgctctgcctgtcttctatctttgtggacctggtttgcatttggggtgtgggggtgtttcgtggttcggactgtttgggccctgccgtcctcgttttcagtgggagggggtacctggcaaaggggccctgccctgccatcacagatggcttcctggcatgaggggagccccaggagctgcctcagaagcgggagccctgcctcgtctcccagctagagaccgcacaccagctaactggacattgctaggagaagctgcccttcccatccctaccccagtgggacctggaatccaactcggcagtttccacgcccccagtcatctcccgtggggccagcaggacccaggttggggggtggggccatgtcaggaagctcagccatgcagggccttgaatggcagatcttgcagccaggtgcccaggacagaagccccagccccagcctcatctacaccccaggagccctggcctggtgagagggagtgggctcgggcctgggcaagggtgggcagcctccaggggcatgggggtggtgggcttctctcagctgcctggggctccacccccgtcctttggggtccctgggcacccctttagagtcactttccccggcaggccctaccgcccccagccctaccagccgcccgccctgggctgtggaccctgcgtttgccgagcgctatgccccggacaaaacgagcacagtgctgacccggcacagccagccagccacgcccacgccgctgcagagccgcacctccattgtgcaggcagctgccggaggggtgccaggagggggcagcaacaacggcaagactcccgtgtgtcaccagtgccacaaggtcatccggtgggtggcctgttcctgtccgaccctggctttcccatcctgcagcccagccccacctgtctgcccacctgtcttgcctcagctgcgactggggggaataaggattcagttctcagctggagtaggagtagggacctgggctgggtcctcccattcttaatcccacgctacctaccccagcccacccacaacaactgctagcagcatctgccgtggcgaaatagccgaagggccaaccataggctgaagctgcacccctacctttgctgctctctgggcaaagaggggcctgccccctcccagcgcgtctgcccctccctcctgctctctgtctccctctgctctcagagcatacaggcctggagccactccctctgtgcactgccccgtggggccaagcagcatcaaacaccccccagcatcagcgtgccggattctagagccttcctaattcgcaggcctggcctgctctcatctctgtcagctcttttttttttttttttgaaacagagtctcactgtgttgcccacgttggcgtgcagtggcgcgatctcggctcactgcaacctctgcctcctgggttcaagagattctcctgcctcagcctcctgagtagctgggattacaggcacccgccaccatgcctggctaattttgtatttttagtagagacggggttttaccatgttggccaggctggtctcaaactcctcacctcaggtgatctcaggcctgccttggcctcccaaagtgctgggactacaggtgtgagccactgtgcccagccgactctatcagctcttgccaggtagaacaggcaggccagcaggacagggcagctccagggtttgcccaggggcggctcagcttttatgaggctccagtcgtcagcccttcctcccggggtcctccctgctctaaagctgcctctcctgtcaccagcagttcagtgtggcggactggctctgtaagcttcacggctgccacggtcacttcccaagcctgtcttctatcctatgtggaaaatggggagaatgaactgtccctcccaaggcctcctggtgggtggtcagtcaacctgaagggggccaagacccccacctctctgcgtgtgctccctctgaccgctctcgcctccctgcaggggccgctacctggtggcgctgggccacgcgtaccacccggaggagtttgtgtgtagccagtgtgggaaggtcctggaagagggtggcttctttgaggagaagggcgccatcttctgcccaccatgctatgacgtgcgctatgcacccagctgtgccaagtgcaagaagaagattacaggcgtgagtagggctggctggcggggaggtggtcccaagcctgtcagtgggaacgagggctgctgggaaacccacagtccaggtctctccccgagtgagccctccgggtccttaccagcgtaataaatgggctgctgtactggcctcaccctgcattagtcaggatgctcttaacaaatgaccatgttcctgctcagaaaccgcccaaggctgcaaagagcaggaggaccaagccaggagaagccctgggccctcctgactcccactttgggctctccctgccctggtgaaatgacagaacggccaacttgacacgctgaagctgctctgtctcatgcgtcctcctcatttctggatccagagccagggctgccaggagtagccagagagctctgtgtggtgatgttcatattagtgaggtttaccttgaccacgagcagtgggaaactcaaaataatggtggcttatttctcatctaaaaacatcccggggtgggtggtctgggactgatctggtggacccaggctccgccttgttgcttgactgttggcagcacctgcttacttaccactcatggtgcaagatgacacttcagcctccgccaaaatgctcaccttccagccagcaggaagtcggaaggagaagaaaggggacagagccccatggcgtccatccttagaggatgctgccacctgaacctctgctttcatcctgttggtcagaacccagtcacatgaccacacccagtggcaacggaggctgggaaatatagtctttattttgggcacccatgtgtccagcaaaactgggggttccatcagtcggcaagaacgggagagtggccgatgcagtggctgatgcttgtatcccagcactttgggaggtcgaggtgggcagatcacctgaggtcaggagttcaagaccagcctggccaatatggtgaaaccctgtctctactaaaaataaaaaaattagctgggtgtgctggcgcacctgtagtcccagctacttgggaggctgaggcaggagaatcgcttgatcttgagaggtggaggttgcagtgagccaagattgtgccactgccttccagcctgggagacagcaaaaaaaaaaaaaaaaaaaaaaaaaaaaaaagggccaggcacggtggctcacacctgtaatcccagcactttgggaggccgagatgggcggatcacgaggtcaggagattgagaccatcctggctaacacggtgaaaccccatctctactaaaaatacaaaaaaattggccgggcatggtggagtagtcccagctactcgggaggctgaggcaggagaatggcgtgaacctgggaggcagagcttgcagtgagccgagatcgcgccactgcactccagcctgggcgacagagcgagactcttgtctcaaaaagaaaaaaagaaagagaaatctgcctcccagccttgggctcctgccccaccagcccacacccctggtagagccccctctcccaccagctcaaagcccaagttccttcactgtgaccttgtctgctcctctaaaacaggcaacaccagacagtgagaagagccagccagacatgggcagaaaacctatttctgtgatctactggctgtgtgagcaggggctagttgctctctctgggcctcactgaagagaagggtggcactatgctagggccggcacggttgcaaggtagatgtaagatggggtacaggtgttgtggagggcagaaatgcaccatccgaaggctacatgtcccccacacttatgtcttgcttggcccacactgtttcattttaaaatcagtagcaaacaatttaaaaaatcagaagatttgcctgcatgatgcagtggctcatgcctgtaatcccagcactttgggaggccaaggtgggaggattgcttgagcccaggagttcaagaccagcatgggcaccatagcaagacccctgtttctacaaaaaaaaaaaaattagaaaattagccaagtgtggtggcatgcacctgtggtcccagctacttgggaggcagagggaaagtgagatctcctgctttttatttctttatgtataatgatagggtcttgctctgttgcccaggctggagtgcagtggcatgatcactgctcactgcagccttgatctcctgggctcagaggatcctcccacctcagcctcccaaatagctaggactagaggtgcccaccagcatgctcagcagatttttaaatctttttgtagagatgaggttttgctatgttgcccaggctggtctcgaactcctggcctcgagcgatcctcccaccttggcctcccaaagcactgggattacagacgtgagccactgcgcccagcagatttctctttaacacctagatttcagcctgagccaggcaggcattcctgaatgaaccagtagtactgctcccagaagaagaggtcctcctccgtgtgacacagtccccacttggcccttgcagggattggatctgggatccctggatttaaactcagggccatcctcataacagcctcacaaggctgggattagcttcccagttcacaagggaagaaaccaagacttgagaaggtcaaggtctggccagacccacacatcttggaccctcataccgcctcgaggccccatgctgccctctgcctgctccagatgtgaatactgctggccctggctggccccggctggccccgagggtcctagggatgaacagcccagcccagggagagctcagccccttgtgcctctgccccttcccacctcctgtggaggccagtcgactcacccacaaagggccaggcactgtggggatagatcagctaacaaaacagttgatgcttcctgcccttctgggccttacattttggctggaagaagaggggagaggcagactgtaagcaataagcgcaataagtaggttgcctggaagtaatgttagatcacgttacggaaaacaggaaagagcagagcaacaagtgctggggtgcgtggtgcagggaaggcagctggctgctgctggtgtggtcagagtgggccctcatggagaagactgcattcgagcagaaacttgaagggggtgaggggtgagcctagagatatctggggcagagcagtccaggcagaggggacagccggtgtcaagcccaggacaggagtgtgcctggtgtgccagtttcaggcaagaggccagtgtgcagaggcaaggtgagaacgcaagggagagcagtggcggagacgggtgggaacgaggtcagacctgctggcctccagcctctgcatggggcttggctcttgctgggagcaatgggaagcagtacacagtttcatgcagggggagaaggcctgtcttgggttgcaggggcacgctgtggcagctgggatcagagagaggagcttgtaggccagttgttatgtggtcccacgggccagatggccatggcttacctcacttcagggaggctgtgagaagcactcagaatctggatgtgccttgggggtgggccccactggatttcctggtggacctggtgtggggtgtgagaggagggtgtgtttggctgcagcagacaggagaatggagttgccatccgcgtgatggggatggctgtgggaggagaggtttggggtgagggaatcaggaactgagtgctggacatggcaagtctgaaggcgcagtggtcgtccactcagagaccttggagttggagatggaggtgtgggagtcctgaacagttagatgtagtgtttaccgcgagaaggaacagggcttgcggccagccctcctgtgttcccgtgacccagggcagggcaggaggggcctgagcctgccgagtgactgggacctccttccaggagatcatgcacgccctgaagatgacctggcacgtgcactgctttacctgtgctgcctgcaagacgcccatccggaacagggccttctacatggaggagggcgtgccctattgcgagcgaggtacccactggccagtgagggtgaggagggatggtgcatggggcaggcatgaatccaggtcctctttctctctgcccccattctcagactatgagaagatgtttggcacgaaatgccatggctgtgacttcaagatcgacgctggggaccgcttcctggaggccctgggcttcagctggcatgacacctgcttcgtctgtgcggtgagagccccgcccctcgaactgagccccaagcccaccggccctctgttcattccccaggagatgcaggagaagttgggaaggggcctctcctgctgcccccaaccccatgtgactgggcctttgctgtccttagatatgtcagatcaacctggaaggaaagaccttctactccaagaaggacaggcctctctgcaagagccatgccttctctcatgtgtgagccccttctgcccacagctgccgcggtggcccctagcctgaggggcctggagtcgtggccctgcatttctgggtagggctgggcaatggttgccttaaccctggctcctggcccgagcctggggctccctggggccctgccccacccaccttatcctcccaccccactccctccaccaccacagcacaccggtgctggccacaccagccccctttcacctccagtgccacaataaacctgtacccagctgtg

SEQ ID NO: 835 - DNA, 393 bp, Homo sapiens
gaccccatgtgccaggcccggtgcccacagacatgaggggagccactggtctggcctggcttggaggttagagaagggtagttaggaagggtagttagcatggtggctcatgcctgtgatcccagcactttggaaggccaaggtgggcagatcgcttgaggtcaggagttcgagacctcatggccaacacggtgaaacagcgtctctagtaaaaatacaaaaattagccgagtgtggtggggcatgcctgtaatcccagccactcaggaggctgaggcgggaaaatcacttgaacctgggaagtggaggttgcagtgagctgagatcacaccactgcacgcgagcctgggtggcagatggcagagcgagaccctgcttcaaaaaaaaaaaaaa

SEQ ID NO: 836 - DNA, 393 bp, Homo sapiens
gaccccatgtgccaggcccggtgcccacagacatgaggggagccactggtctggcctggcttggaggttagagaagggtagttaggaagggtagttagcatggtggctcatgcctgtgatcccagcactttggaaggccaaggtgggcagatcgcttgaggtcaggagttcgagacctcatggccaacacggtgaaacagcgtctctagtaaaaatacaaaaattagccgagtgtggtggggcatgcctgtaatcccagccactcaggaggctgaggcgggaaaatcacttgaacctgggaagtggaggttgcagtgagctgagatcacaccactgcgcgcgagcctgggtggcagatggcagagcgagaccctgcttcaaaaaaaaaaaaaa

SEQ ID NO: 837 - DNA, 930 bp, Homo sapiens
  misc_feature (929): n equals a,t,g, or c
ggggcgcaggccctacaggacgcgggctatgccaccgatcctcactatgcccgcaaactcaccaacatgattcagcagatgaaatcgataagcgacaaggtgagcaaaacctacagtatgaacattgataatctgttctgaataactcaagtccggcgggtcgctgccgataatactctgtaattgaaggcttataaggaacctccatgtccagcttgattaataacgccatgagcggactgaacgcggcccaggcggcgttaaatacggcaagtaataatatctccagctataacgttgccggatatacccgccaaaccactattatggcgcaggccaatagcacgttgggcgctggcggctgggttggcaatggtgtctacgtttctggtgtgcagcgtgagtatgatgcgtttattaccaaccagttacgtgcggcgcagacgcaaagtagcggtctgactgcccgctatgagcagatgtcgaaaatcgacaatatgctctccaccagtacctcttcgctggcaacacagatgcaggatttcttcaccagcctgcaaacgctggtgagtaacgcggaagacccggcagcgcgccaggcgctgattgggaaatcagaaggattggtgaatcagtttaaaaccaccgatcaatatctgcgcgaccaggacaaacaggtcaatatcgcgataggtgccagcgttgatcagatcaacaactacgctaaacaaattgccagcctgaacgatcaaatctcgcgcctgacaggcgtgggggcaggggcgtcacctaacaatctgctggatcaacgcgatcaactggtgagcgaattaaaccagattgttggtgtagaagtcagcgttcaggatggcggcacttataacatcacgatggccaatggttactcactggttcagggaagtacggcng

SEQ ID NO: 838 - DNA, 2429 bp, Homo sapiens
ctcaatgcatattttatttttttacacaaaaatatgagatcctgtttaagtgccttaaaatgtatttgacaagagcgttatttccaaaatatgctttgttgattactgccaggggtggtacaatatttgggggttaattttgctttcctaatgcaggaatcagtcatggtaagtgacaaaaagcaaacatgctttccctgcagcacctttgtgcaatacaaccctatagtagttactgtaatgtttgaaatgaggtcacaccatcaggaaaatgcccttctgatgacagtgaaaatttccaaagtcttattcatgcatactttgatttactgtgtgattctttttttctacgactgtgacatgcctcttccttatcaactcagcaggggtcatagatcgaatagatgctgaaaagcgtaagatatatgcattccttgacatcatttttaaagacattccttcaaatagtttccacacagaaattcctcactcccattatgagagattgtggttatatgtcttaaatttattataagctgcttcaaagaaagggtctgaatgtttgaattatgagtgaaatcatgtgaaattttgagttaaactctgtgatttgattttcagggtctttaaaatatatcttaatatcttcttcctctttattcaataatttctgtcttgcacttacacactcataacagccaaatatgaggcacacaaaatgttacaatcagtttgaaagcagcatcaattaatggtagattctattcacattccacaacccagaccaaatttttttcctattacgcagatgtgctgagcactttccagattgcccctgttggccaaaagcagcctgttacatcctggaattaagcacacttaaggtatttgagacaatttattaatgaaaatttccttggcagatttgacaaatgttggcaatatttttttagaagttaaatcatattgctttcatgaataaatgaaaatataaaggtcatggatgcaaacaaatgttacatatacacattctgtctctccagatgaaaagaacatgcaaaaccatttaataaccaaaatatcaagtaaaattagttcccaacggggcagcagctttcaaatgagtgtccaatatttgcttctgctatagctgcaagaactgtaactggacccaagtagagaatgaagccacgtatagaactacgagaacacttttctgtgtttcccccatgccgtcctgtcacatcctcttacacgtcctctcttgatttgatagacaatattggcatcctgggtctcactgaggccgtgctatgtcctcagcagctgtttttgttgtttcgttattatgcccacaacaaaaaatcattccttagaaactcaccaagtttatctactgtgtaaatttatattattgttactaccaggtctcatcttttgtcaatgtcattgaataaatttcataagagttattctcagtgtgaattttaaggctaatgccagatcctgcaaaaatctatgctaaccaggctgtagtacacactgttataaagaattttacttgtgtctaaaactacagtaattttgcttaggtaattgtgcttacctatggagcacaggaaggctcttaggttttgttcctacaagtttctttgaattttggagtaaatggaagtgtctgtctgtctgtcatctatctgccctatcataaaaatctttctccctaacattaaaatactgatccccgcccccaacttatctacctctattgtctaacacctatagtaggtgtgatcatgggataaaattcaactgaaaatgctatgataacattttatcgtttgctttaaaaatgtgctttgttttcaaataatctttacatagtgaactttggtggcgttagtgatatgtttatgcctatttcttttttttacacaaattccttggcatattttttcataaagaacaaaaaataaaatcaaaatttatttttaattcatgcttattgggatttaattattcagagcttaaaatattttgttatgtttatacactgtaaagctatctgttttatgcatttgttttgtctaaatgtatttatgaaagaaatacattagattatatttatgtttactcatttttccacctggattttttttaatggttgttacaaaattagattttttaatgggtaataatgttggtattttcatgttttttcttagtattaaaatttttgtgggttttttaaaatttttccctattctgttaaaaattaacacacctctagctaatgttcagtgtttgtgctaaataccaaattttttcaaaaggattggttaagtcataaagtggattatttatgatgactggaagatgaaaataattatatgattaaacaaagaatgtttcagaaatcacaagagaaa

SEQ ID NO: 839 - DNA, 2428 bp, Homo sapiens
ctcaatgcatattttatttttttacacaaaaatatgagatcctgtttaagtgccttaaaatgtatttgacaagagcgttatttccaaaatatgctttgttgattactgccaggggtggtacaatatttgggggttaattttgctttcctaatgcaggaatcagtcatggtaagtgacaaaaagcaaacatgctttccctgcagcacctttgtgcaatacaaccctatagtagttactgtaatgtttgaaatgaggtcacaccatcaggaaaatgcccttctgatgacagtgaaaatttccaaagtcttattcatgcatactttgatttactgtgtgattctttttttctacgactgtgacatgcctcttccttatcaactcagcaggggtcatagatcgaatagatgctgaaaagcgtaagatatatgcattccttgacatcatttttaaagacattccttcaaatagtttccacacagaaattcctcactcccattatgagagattgtggttatatgtcttaaatttattataagctgcttcaaagaaagggtctgaatgtttgaattatgagtgaaatcatgtgaaattttgagttaaactctgtgatttgattttcagggtctttaaaatatatcttaatatcttcttcctctttattcaataatttctgtcttgcacttacacactcataacagccaaatatgaggcacaaaaatgttacaatcagtttgaaagcagcatcaattaatggtagattctattcacattccacaacccagaccaaatttttttcctattacgcagatgtgctgagcactttccagattgcccctgttggccaaaagcagcctgttacatcctggaattaagcacacttaaggtatttgagacaatttattaatgaaaatttccttggcagatttgacaaatgttggcaatatttttttagaagttaaatcatattgctttcatgaataaatgaaaatataaaggtcatggatgcaaacaaatgttacatatacacattctgtctctccagatgaaaagaacatgcaaaaccatttaataaccaaaatatcaagtaaaattagttcccaacggggcagcagctttcaaatgagtgtccaatatttgcttctgctatagctgcaagaactgtaactggacccaagtagagaatgaagccacgtatagaactacgagaacacttttctgtgtttcccccatgccgtcctgtcacatcctcttacacgtcctctcttgatttgatagacaatattggcatcctgggtctcactgaggccgtgctatgtcctcagcagctgtttttgttgtttcgttattatgcccacaacaaaaaatcattccttagaaactcaccaagtttatctactgtgtaaatttatattattgttactaccaggtctcatcttttgtcaatgtcattgaataaatttcataagagttattctcagtgtgaattttaaggctaatgccagatcctgcaaaaatctatgctaaccaggctgtagtacacactgttataaagaattttacttgtgtctaaaactacagtaattttgcttaggtaattgtgcttacctatggagcacaggaaggctcttaggttttgttcctacaagtttctttgaattttggagtaaatggaagtgtctgtctgtctgtcatctatctgccctatcataaaaatctttctccctaacattaaaatactgatccccgcccccaacttatctacctctattgtctaacacctatagtaggtgtgatcatgggataaaattcaactgaaaatgctatgataacattttatcgtttgctttaaaaatgtgctttgttttcaaataatctttacatagtgaactttggtggcgttagtgatatgtttatgcctatttcttttttttacacaaattccttggcatattttttcataaagaacaaaaaataaaatcaaaatttatttttaattcatgcttattgggatttaattattcagagcttaaaatattttgttatgtttatacactgtaaagctatctgttttatgcatttgttttgtctaaatgtatttatgaaagaaatacattagattatatttatgtttactcatttttccacctggattttttttaatggttgttacaaaattagattttttaatgggtaataatgttggtattttcatgttttttcttagtattaaaatttttgtgggttttttaaaatttttccctattctgttaaaaattaacacacctctagctaatgttcagtgtttgtgctaaataccaaattttttcaaaaggattggttaagtcataaagtggattatttatgatgactggaagatgaaaataattatatgattaaacaaagaatgtttcagaaatcacaagagaaa

SEQ ID NO: 840 - DNA, 900 bp, Homo sapiens
ctcctgtttgccttggtagcttcccagcttcctctcacatgactgtttctgtttacttctccctctggccttcctgcctgcggcgtccctgtgccacctagagtctcatctaccgcactagacatagcctctgcaatggccccgcaccagggcctccttccagggcatatcccgtctctgtctcacccttctagtctgcgcttgcccttctcactccccagctctctctgttactgtcagtggagggtctgtgcactttgtcgttttgatcctatgacgttgtatctgtggctcttccttcaagtgcccaggagaggcccagctcctggggccagaaaggggttagtcttgaagtcttgggttggacatttcaccatggccagcccagagctcggctggaaacagatgagagacaacatgtgaggaggcagacaggagctggggatccaggctctgagcacctgagaggtttgggggaaggtattggtaatggattggattgtgtcccccaacaaaagattttcaagtcctaacccctgtacaggtgaatgtgaccttatttggaaatagcgtctttacagaggtaatcaagttaaaatgaggtcatttgggcaggtgcagtggttcatgcctgtaatcccagcactttaggaggctgaggtgggtagatcacttgagtccaggagttcaagaccagcctgggaaacatggtaagaccctgtctctacaaaaaatacaaaaaaattagccattagctgggcatggtggcatgtgcctgtagtcccagttactcaggaggccgaagtgggaggactgcttgagcccaggaggtggaggttgcagtgagtggagactgcaccactgcattccagcctaggcaacagagcgagaccctgtctc

SEQ ID NO: 841 - DNA, 876 bp, Homo sapiens
ctcctgtttgccttggtagcttcccagcttcctctcacatgactgtttctgtttacttctccctctggccttcctgcctgcggcgtccctgtgccacctagagtctcatctaccgcactagacatagcctctgcaatggccccgcaccagggcctccttccagggcatatcccgtctctgtctcacccttctagtctgcgcttgcccttctcactccccagctctctctgttactgtcagtggagggtctgtgcactttgtcgttttgatcctatgacgttgtatctgtggctcttccttcaagtgcccaggagaggcccagctcctggggccagaaaggggttagtcttgaagtcttgggttggacatttcaccatggccagcccagagctcggctggaaacagatgagagacaacatgtgaggaggcagacaggagctggggatccagggctctgagcacctgagaggtttgggggaaggtattggtaatggattggattgtgtcccccaacaaaagattttcaagtcctaacccctgaacaggtgaatgtgaccttatttggaaatagcgtctttacagaggtaatcaagttaaaatgaggtcatttgggcaggtgcagtggttcatgcctgtaatcccagcactttaggaggctgaggtgggtagatcacttgagtccaggagttcaagaccagcctgggaaacatggtaagaccctgtctctacaaaaaatacaaaaaaattagccattagctgggtgtggtggcatgtgcctgtggtcccagctactcaagaggctgaggcaggaggattgcttgagcccaggagactgaggttgcagtgagctgtgattgcaccactgcactccagcct

SEQ ID NO: 842 - DNA, 1977 bp, Homo sapiens
catactgtccccaaggtccatccattctcttccttttgaaggctgagttgtgccccactgtgtgcctagaccgcatctggttgacccatccatccgtcgatggacacattatgaatggtgctcctgtgaacactgtgtaccaataagtgctttttgagcatgatcacgtgcctggcattgtgctgggctgcagtgggaaatgaacttggttcccatgctctgggggtaatgttaagaagcaaacaccaatagatgtttactaagagactgcaatatgtcccgtgatgggaaagagcagtgttcggggagagaattatggcaggggtggaggtgggtggctgggacaatggtcaggtctcaggaagtggcctgaagaatggggaggagaggtgggcaggggtggggagggtccaggcagaagtaacaacatgtgtgaagccactggattgcgacagagttgcccgttggagggattgatgcttagatttctgcttcagtgtcttctccagcaagcatcctatcagcctccaggcccacctctccccatcatcttctcctctctgctcttattctagttcattcaaactgcctctttgctcagctatttctcccactgtccagtgagcggcttgagtgcaggaactgttttattttatgtttgcgccttcttttcatatcttagtaggtgtcagtgactctcaaacagatactctcctgaaggagggtagtgctttcactggcaatgacccaagaccatcatctggggcctgccagagtcaggcacagccccggcattagaactttgggctgtaagcctgtcctctgtgcttatgtgggtggtgcacaaagcacttgcaaacatctgtgtgcagtgctgctccattcggcctgctgaagctttcctgccctgttgccgctgaagcagggagtgtgggaagcgcccagctcagagctgggccagatgtggccatacctcccagcagtgcaagcagcatcactgcgccaggccagctgactcggctggccctggtgcacagtgcttaggggcttgtggccacgagccatgccccaccacctctcctgtttgccttggtagcttcccagcttcctctcacatgactgtttctgtttacttctccctctggccttcctgcctgcggcgtccctgtgccacctagagtctcatctaccgcactagacatagcctctgcaatggccccgcaccagggcctccttccagggcatatcccgtctctgtctcacccttctagtctgcgcttgcccttctcactccccagctctctctgttactgtcagtggagggtctgtgcactttgtcgttttgatcctatgacgttgtatctgtggctcttccatcaagtgcccaggagaggcccagctcctggggccagaaaggggttagtcttgaagtcttgggttggacatttcaccatggccagcccagagctcggctggaaacagatgagagacaacatgtgaggaggcagacaggagctggggatccaggctctgagcacctgagaggtttgggggaaggtattggtaatggattggattgtgtcccccaacaaaagattttcaagtcctaacccctgtacaggtgaatgtgaccttatttggaaatagcgtctttacagaggtaatcaagttaaaatgaggtcatttgggcaggtgcagtggttcatgcctgtaatcccagcactttaggaggctgaggtgggtagatcacttgagtccaggagttcaagaccagcctgggaaacatggtaagaccctgtctctacaaaaaatacaaaaaaattagccattagctgggcatggtggcatgtgcctgtagtcccagttactcaggaggccgaagtgggaggactgcttgagcccaggaggtggaggttgcagtgagtggagactgcaccactgcattccagcctaggcaacagagcgagaccctgtctc

SEQ ID NO: 843 - DNA, 5402 bp, Homo sapiens
  misc_feature (4456): n equals a,t,g, or c
gggcgcggtggctcacacctttaatcccagcactttgggaggccgaggcgggcggatcatgaggtcaggagatggagaccatcctggctaacatggtgaaaccccgtctctactaaaaatacaaaaaattagctgggcatcgtggcgggcacctgtagtcccagctacttgggaggctgaggcaggagaattgcttgaacctgggaagtggagcttgcagtgagccgagatcgcaccactgcattccagctgggtggcagagcaagactccgtctcaaaaaaaaaaaaaaaaaagagaattgggccaaatttttaccccttctataccggggactatgctcctaatcatatggtctaagaacaaaatcttttattattaatttaaggcttaggtattatcaggtataggtggcttccctacatgctggcattaaccaggcctcactcttcctaaggctttgtaggggatatcttgggcaggtcttctggttatcaccaggtagttttcctcttgatgaatccaattcatggtttaagccaccatcctgatccaggtactcagcataggtgctgtctcctcaaacttgtgtcacctgcagattcagtaagcatgggttccaacctttaatcaatttaaagactaatgggtataccaaggccaaggccaaagacagagttgttaaaaatatgcagctagggccaggtgccatggctcatgcctgtaatcccagctctttgggaggttgaggcgggtggatcacctgacgtcaggagttcaagaccagcctggccaacataggacgactccatttctacaaagaaaaatacaagtgcatatctatggtcccagctattcagaagggtgaggtggaaggattacttgagcctgggaggttgagactgcagtgagctgagattgcaccactgcactccagcctgggtgacaaagcaagcctgtctcaaaaaaaaaaaaaaaaaaaaaaaaaaaaagcaatgaggctaatattgattggattgtagtcatttaacccatcacaaacccacccaattctaacttccacctccatcttataactgcctttgtcaaatcccttgtcaaaaaccagtagtcgatacacactacattttctccaacactctttgaccctgtcaaggaagaaaacaaagcggagcttagcaaagcagcccacgctgattgctggtattcaccacttccatggagcctaaggtgttctcaaagagaatttgtggttacaacatgcacatgaagattaattcacttgccagtagaagcaaagaattctggggaccagaattcaagaagggagtttggcctactcgaagttagaagaattctccagtatctatgattaatggtcatcagatgttatagtttattcttaatacttagtttgctaacctggtttcctagtataccttctcatgactcattattttaggtctttttaaggacatcgtaatcctttcaatgcaaacatcaatgcaatttgatggcattctttattttgcggacattcgctgttcttcaggtggttgaagcttaaatgaggcgcacagagatgagctacagagccccaggctgtaatttgcgctaaccagtggatgacctgccaaggcatgagttaggcatttgggattacatcttcaacttcttggagcagtgagacacggtggacagaatatcagcttacccctcagctctgcttttttggggaattcttggacaggagataaaatgagaggacattattgctggaagcatctatagagagcctctaggacagtagttaccaaactgaagtgtgcatttgaaccatctgggaagcttgttaaaaatgcaggttctcagccaggcgcagtggctcatgcctgtaatcccaacactttgggaaccgaggtgtgcagattgcttgagctcgtgagttcatgaccagcgtgggcaacatggcaaaaccccatctctacaagaaatacaaaaattagctggccatggtggtgtgtggctgtagtcccagctacttgggaggctgaggtcccagctacttgggaggctgaggtcccagctacttggctggcgtgtgcctgtagtcccagctacttgggagcatggcttgagcctgggaggcagagattgcagtgagccaacatcgtactactgcactccagcctgggcaatagagccagaccttacctaaaaaaaaaaaaaaagtaggttctcagaccaccactctcccaagatgggcaactggaattgtgaacacttctgggcctcactggttcctcctccagtgtcaaatgaagggttagactcgagttattctagaacaggaatttgcgtgttgacagtctccccagctggttacaagcccttggccttttgccccacacttggagaaacactgagtctactctcagtttacactggggaggacagggaggctcagaaatgctcggtaatctgcccgaggtacccagtgagtgaccacagttctgagcttctgtttccttctgggtaaaaggggcctgatgatgttttccccccccgccatccaagattttgataaggcttaaacgtacgtgtgtgaaaactgtcaagtgctctgtggatacaagtcgagtgactcttaatggccaataggccaggtcctgggagcctaggaccatggaaaaggggagaggacaccacaacctcccaccagcccagtcgttccagaaacccatcaaggtgggccagtgtgaggtgaccccagtcttatttgtgtatatgtcagcccctaccccagtgggtctttcccccatagctgtcaatgggaaggtggtgatgttagaggccctcctctatagttgacttgggggtgtctgagcctctgcagctcacttttctctgccccctttttagtgtgctggctgggacaatagagtgggtttctctttgagaaactagcaggtggatttggggcaggcacatctacctccttcactttattctcagggcttttgcaattactgtaccccttgcttgtaaacctccttcccgcaggtccccatgtggccccctttctacctccttcaggccttggctcaaatgtccactttgcagtgaggtcttctagacttccagtccactgttcccactttatttgatttatttatttttttgtggagatagggtctcactctgttgcttaggatggagtgcagtggcatgaacatagctcactacagcctcaacctcctgggctcaagtgattctctcaccttggcctcctgagtagctggcaccacagcacacacccccaggcctagctagttttttaaacttatttttttagagacttggtcttgctatgttgcccaggcttgtcttgaacttcaggccttcagcaatcctctcacctcagcctcctgagcagctggaattacaggtgtgagtcaccgtgctcagctctgctttctttttatccgtagcattcaccaccgcctgactgagtggtattttatttaccttttttgttcgtttattgtctccctccccagcccaccacgtaagcttcaagagggagggatccagtgaaatttctcagcacctactctaagccagtcacagctttagggcactggggagctggagatgagctgggcttggagccccaccctctagcagctggccatgcagcagaggcatgcccagtggggctctgtgacagtgcaggtgggggaagctggcacctgtgtagaggtggctaaggcccactgagttccaggcaggtaggtgtgtttctgtcctggcctattctctgtccctcagtactgctctgaggtgcactgctctgggccagagccctgaactaggaagcaggctggggttaggcctggcccatggctgactttccgtgggaccttggacaaatcacttcctggtgcaagcttcatttttctcatctgtacaaagaagaaaatcttatcaccccctgcagtttgggttattttaatgggaaagcctctcaggggcctgcaagcccctcctccttcaaagtggggccagatgaaaggaagactcgttccgaggctcctctctgacagatccgataaagctccctagcttcggctgcgtggcccctgggacggctcccatttttattggtcttggcgcaaaagcacagtggagctttgatgactaaagaagccctttgctttgtctccccgtggcccttaccttgacaaaagcagcttttactgctgccattctcccctggtttgctttgtgtccctaacccccgacctgaaaagcctggagccctcaaagggccttgcctccgcctgtcagcgctggggttctagatggaggaaagcaaagacgcagatgcagaggcctctctgttccctgcgccggggtccctgcgggtgacgtgatctctcttcggctttcgtgtcncagaggtcagttgcagaggcagagatcccattactcgggcttgcaatctataacttccttgtgccttgtgtcttacagaaatttaaagagtatgtgaatggcagtaacctcatcaccaagctgcaggccaagcacgatttactcaagcagaccctgggcgaaggtgagtgggctggtggaggccctctgggaggtgctgcgttccccactggctctcactgtggccccctgacgtgttgagctgttcaggcttgagacagcaggcacctggcagaatgaacctggacttaccaggactgggcaggctgggaaaatcaccttggtacagatgccttgtggggtccaatctggctatagaaaatagagggtgtgagttgctttttgattaatagaaagaaaaaaaataaaataaagaaaatagaggctgggcacggtggctcacgcctgtaatcccagcactttgggatgctgaggtgggcggatcacgaggtcaggagatcgagaccatcctggctaatacggtgaaaccccgtctctactgaaaaaatacaaaaaattagccgggcgtggtggcgggcgcctgtagtcccagctactcgggaggctgaggcaggagaatggcgtgaacccaggaggcagagcttgcagtgagccgagatcatgccactgcactccagcctgggcgacagagcgagactccatctccaaaaaaaaaaaagaaaagaaaagaaaatagaggccaaccacaagtcttagtttaggttggcagggacagtccaaggcaaagtgatagaggggcatccatcaggtagggagtgggaatccagggcctcagaggctggcactgacatttttcagcagacactatttgcaaggaatactactggagtgtctggctagggttctaggtccagagaaggaaaatccatacatgtaagtcagggtt

SEQ ID NO: 844 - DNA, 688 bp, Homo sapiens
catactgtccccaaggtccatccattctcttccttttgaaggctgagttgtgcccccctgtgtgcttagaccgcatctggttgacccatccatccgtcgatggacacattatgaatggtgctcctgtgaacactgtgtaccaataagtgctttttgagcatgatcacgtgcctggcattgttctgggctgcagtgggaaatgaacttggttcccatgctctgggggtaatgttaagaagcaaacaccaatagatgtttactaagagactgcaatatgtcccgtgatgggaaagagcagtgttcggggagagaattatggcaggggtggaggtgggtgcctggaccaatggtcaggtctcagaaagtgtcctaaagaatggggagcataggtggccaggggtggaaagggtccaggcaaaagtacaaacatgtgtgaagccactggattgcgacagagttgcccgttggagggattgatgcttagatttctgcttcagtgtcttctccagcaagcatcctatcagcctccaggcccacctctccccatcatcttctcctctctgctcttattctagttcattcaaactgcctctttgctcagctatttctcccactgtccagtgagcggcttgagtgcaggaactgttttattttatgtttgcgccttcttttcatatcttagtaggtg

SEQ ID NO: 845 - DNA, 694 bp, Homo sapiens
cccatggtgctgggattaaaggcgtgaaccactgcgcccggcctatttttagcctttctaaataattgttttaggtgtttctcttgaatagagcatatagttggttctttatgaacccaaatgaagatcttttccatttaataagtgaagtaagccctttcacatgtgttaagatgaatatgtttgctgtcaaccctgccagattattttatgctgtaattattatatttattacatttagtctgtttttcgttataatgtgtttactgtgctcttctttaaaaacaaaatcttaaatttggtatttaggaaggtttatgtttctgttgtccttttgcttatactttttttaatgcccttagcgccccccccattttttatttagaatctgtattgtccatctttaatgacattctttaactttcacatgttgcttaaataccagttattgagttttcctactttccttttttcatctaccttctcttcctatttttagttgcatcattttttattcatcagaacatacagcacaaaacaaatagcattatcatataacctattattattataccctgttctcaccttaattttgatcttagatttgcaattaagtatatttaatgctaaattgctgaagtttctctagtcatttttttgtttgaataaagtttattttctagcagatttctta

SEQ ID NO: 846 - DNA, 694 bp, Homo sapiens; identical to SEQ ID NO: 845

SEQ ID NO: 847 - DNA, 190 bp, Homo sapiens
atttctgccatataatcagatgcatgagtttctctttttatttccttttgttccatttttacaaatgtattgagaaaaatagttcaaaaatctttccttacaacggtttgcttgctttgcttgctacttcatccaatatcagtattgtgcttctgctttttttttttgaggtaaagtctcactggagtgc

SEQ ID NO: 848 - DNA, 190 bp, Homo sapiens; identical to SEQ ID NO: 847

SEQ ID NO: 849 - DNA, 337 bp, Homo sapiens
ggtgaacagtgagggagatgaccgctcacctctgctgcttcccatcaggacaaacccccagagttccccagtatggtcaggctgaagctaaaagccgctgtccaccggattttgcctgagaaaggactcatctttggcttgtctctttccctttcctgcctcctttactcccttcccagtttccctgaggaccacattcttaataaatcacttgcagagaaatcctcacttcatcaagatctgcttctggggaccccgacctaaaacagtaagtcacctaggacccccatcattgtttttgagtcttctggaaaacagcatcccttctcaacacaca

SEQ ID NO: 850 - DNA, 337 bp, Homo sapiens; identical to SEQ ID NO: 849

SEQ ID NO: 851 - DNA, 337 bp, Homo sapiens
ggtgaacagtaagggagatgaccgctcacctctgctgcttcccatcaggacaaacccccagagttccccagtatggtcaggctgaagctaaaagccgctgtccaccggattttgcctgagaaaggactcatctttggcttgtctctttccctttcctgcctcctttactcccttcccagtttccctgaggaccacattcttaataaatcacttgcagagaaatcctcacttcatcaagatctgcttctggggaccccgacctaaaacagtaagtcacctaggacccccatcattgtttttgagtcttctggaaaacagcatcccttctcaacacaca

SEQ ID NO: 852 - DNA, 238 bp, Homo sapiens
tttttttttgagatggagtcttgcactttcacccaggctggagtgcagtggcgtgatctcggctcactgcaccctccgcctcctgagttcaagcaattctcctgcctcagcctcccgagtagctgggattacaggcgcctgccaccacacccggctaatttttgtatttttagtagagacggggtttcaccatgttggccaggctggtctcgaactcctgacctcaggtgatctgccc

SEQ ID NO: 853 - DNA, 101 bp, Homo sapiens
gggattacaggagtgtgccatcacacctggctaatttttgtatttttagtagagacggtgtttcaccatgttggccaggctggtctcgaactcctgacctc

SEQ ID NO: 854 - DNA, 130 bp, Homo sapiens
ctgcctcagcctcccaagtagctgggattacaggcgcctgccaccacaccgggctaatttttgtatttttagtagagacagggtttcaccatgttggccaggctggtcttgaactcctgacctcgtgatc

SEQ ID NO: 855 - DNA, 24173 bp, Homo sapiens
caggcttgcccacagaccggatcttgctgcggtcgaggcggacccgggcatctgggcgcccatcggagcctgtggtgggagtgatggtaacgagtccctcgccagcctccagcaagactctcaggatcacaaaccgggcctgcatatgggcctgccggagcaggggaaagacagcatttgtagcccgtatcaagtgcttggtcctaggcttggtccttggcttggtccttggtcccaggcttggtccttggtcccagttgcccattaactggcaactgttattgtcattctccccaaccctgcgggtccttttctgcttattctcctcccctcaaatgcttcctccttcctcttctcacagagagggcaggctgccctaggagacagggaggccatttccaggcgggacctggtgcccatgctccccatgtcacccactgtgatccctgctgctccagatcccctgctgaggacagcagctaccccctccagggtccccaaacactttctcctccacaaccttgtttgtgctcaaaaggggaaccaagtaggcatcattatccccagtttacagatgataaaacagaggcccagagaggtaaagggacttccttaggggcacacagctaataacggaagagccaggactcagacccacatttctggaccctgaatgacgtcacatcgcctcctcaaaccacacctatttgattttgtcaaaaagtttctattgctggtgggatgcggtggctcacacctgtaatcccagcactttgggaggccgaggcgggcggatcacaaggtcaggagatcgagaccatcctggctaacacggtgaaaccccatctctactaaaaatacaaaaaattagctgggcgtggtggtgcatgcctgtaatcctagccactcgggaggctgaggcgagagaatggcgtgaacccaggagatggagtttgcagtgagccaagatggtgccactgcactccagcctgggtgacagagtgagactctgtctcaaaagaaaaaaaaaatacaaaaaattagccgggtgtggtggtgcgcctatagtcccagctactcgggaggctgaggcagaattgcttgaacccgggaggcggaggttgcagtgagccgagatccggccactgcactccagcctggtgacagagcgagactttgtctcaaaaaaacaaaaacgaacaaacaaaaaagtttctattgcttaccccatatccaaaggacacataactgagccgtggcactgaatggccctgtaggcactgtatggatgcgaatcctggctctgcacttagtggcaagttgcttcatctccttgtgcctcgacttcctcatctctaaaatgagggtaacaatagcacctacctcctggggtagttaattcatggagggcgtttagaattgtgtgtggcagagagtgcgtcaactgcgaggagtcctaataaagtcacctcatctgattcaccgtgaaatggtggccggggagagtcctactcccatttcacagagaggaactctggggctcacaagagtgatgtgacttgcctcccaaacagtggagtctagcattaaacccagttcatctgccttaaaggtacagtggtcccatccttgcaccctgatcttggcacccactgcaggctcccttccgcctccagggggctccacctaggccctacctgtcgccagttgaaggcctcaggtgtgtagaactccagagcgagcagcccggcccgaaccatgttgagccagttcacgtagatcacgtcctccgcatcagccccctcaaagccaaagatcctgtgagaggggcaggcaggtggcaggatggtcagaggctgccctgtccccatcccactggccactaccacccaccctccacgcccccagggctggccactgcagcgggacagcccgcccctcggccctgctgctcttactccagcacttgcgggtggagacagaggtagagacccacgctctcagcccggcactcttcgtagctggaggcgatggtgctgaacttgctatcccaggtctccccgctccgataccagctctgaatctggaaaaggagctccactgtcgggcttagggtgccactgccccacctgtgcccaccctcccagtaccctggggctctgctgaggcctccctcacctgctcgcccgtctctgggttgatcactgtttcctggtcaaagttgaatgctcctttttcgtcctgcagaacacacggtgggtgagggaaaggcgcccccaactggatccaggcctccagccccagaatccacaggccggaaagtggctcaggaaggcaagcgggagcgcaggagcgggcggcgggagcagcaggtctgtccacacactgacgcctgcacagccctgagccctgtgacgctggctgcctcctcagagccattgggagcctgagaacctgagctgcctaccccaccacacagagaggaaaactgaggaccagacagccgagggacttgccccaagtcctgtgaggacccagatctggtgtctccagaccccagtgggagatgccccaatgggtaggccagacagcccagctgtgcccaccacgggctcctggcactgccagaggaggccacggtgtcattctcaccctcccactgcatgccatgcgtctttcatgcagcatcctttgaatcctcacaaccatcttccgaggacagtgccactatcaccccacttcacagatgaggaaactgaggctcagagcctaagagccccacactggagtcagagcacacaacctccgtggacgctgtctctcaacactaacacctgtttgctgtcagggcttactgtgtgttagggcttactgtcttcacctttactcctcacaacagcccacacagcaggggtcaggaatctcattttacagatgggccaactgaggctcggtgaaggtgctgaattatccaaggccacacacagccttgataaagtctggacaaggcgtttcgccagactgctgacccagcagctgttctgcgcatcctcctgaccccagggcccagttccagcccttcctgatccagggaagcagccccacaccccgagaagcaggacccacccagaaccccgccctcggaggggaggggccacacctcaccccatttctggtcatcttcatgctgggggtccacatcagcttttcagccccccataaatgactgtctgtgtttccatattccctgggtaggtatggagggggctccagccactctggccggctggcaagaagggtctgctctggggagaagtggctccctacgatacccggaaaagcccaggttccacggaacagcagcgcaaacaaagacagcactgctgcctcagatgggagcacccagagatgccccctgccccaagtgtctgtcctggggctgctggagccacgccctaagcacgcccttagggtgtgcttccttagcctgagccaaacaattcctcctggtgcggggaacagcagctgaactgtcccgaaggccctctacatccaggctctacatccaggctctacaccaggctcatccctgagccccagatgtacacccaggctctacatccaggcatctgagctcctgggacatcttgagggagggcaagacagggtcttctctgcctaaggggccattttccccactcaacccatagctcctgagggcagaggctggagcagcttcaccgctgggtagggcaggttgtggggagtggagctgtaggctggggtgccagggctggccactgccttctcacctgtacgaagagcttgccactgccatggcccagcagctcgtgcaggcccacctgcacatcgaaggagggccccttccagaggatgtacaggtcctgccaagacaagcagagacccgcgctgtccactggccagccctggctatacagcctgtcggcctcccctcccctgggccatggacccatctcagtgcatgtgcttggtaaaggccaactgtgctccaccccacagcccatttcatccttgcaacaacccaggaggaagggagggatgcctccctagtgtgacccaagaggaaactgaggctccaaagtccacacggtcacatggttgggaagtggcagagccaggactgaagctatgtgctttcctctctactgctctgggctgtctctcttcctgagtctgctgaggaaggtgaggcccagccccgaccctccgactgctggcgcccaccttgtcatcctcctccagaaaggtaagcttctcccgctgcgtggcgtaggccacagccagcacattccccagcgacacgttcttaaagccttccgtctgcctcagatcatcgtctggagaaggtggagaaggaccagaaagaagaggtgagggtcaaaggtaacagacaagaggcacagagcagtttgtggagggtgtgtgtgtggacagggaggggcgactctaaaggaaggtttctggggctcggggctgggcctgagacactcacagttggggatgttgatcgcggcagggatgccggagccagcgaaggtgagaacatccagggaggtgaagtcaggggtgaggaacttgtccttctcaaaggttgggggccagggcagctccttcagcagctgctctgcgctcgccaccagccgctcaaacttggcactcatggccttgttcaccacagctacgaaacctgcagaggagggagggggttgtggcttggcagggttccaggagggctcccacttcaccctactccagccatcacgcatgtactgaatgcctactgtatgcagtcaccctgggctggaagatggggatagcagtgacccaggcctgggccctactgggtcaggacctggacaggaaagatgcagctgcacaaacccgtctctccctcaggcccctggccgcctgccccttctccctgggcctgggtcatccctgagccccaacaggtgtgtgctctcctcccaggctaatctctccagctttagcaggcagatgctcagactcttctaaatccaggggctggggaggattagggcagtcagagaagtggctgaatcctcaggctggatgccctgccttgcacaggtgggtcccctggggaagggggtgggggccgcggcagcctgccaccagcctgggatgacagccccgggtcaggtccacagtcacaatgtccatcctgcttccagccactgagtgcagcagtctgcatcctaatcacattggtgctcagaggtctggctatttggcccaagatcacacagcctaggagtggtaaagctgggcttgggaggcacatggctacctggagcctgtgccctgaccagacaccagaggcagcacagcaaaatagctcagagccagggttcctgggccaccccccaactgtgccccagtgctcacatctgcaaagtgaagataaatatcctcatgggatgatggactctaaattagttaatatagctaagcttcttacaacagtgcccaatacattgtaaacggtgtttatttaccatggctgttcttactgttatggttatggctgagcgggggtggggagaaccatcaggggacactggaaacgtggacttggatgtgggggaagggactgtgactgacctcctccctgaggaagttaccttcaaattctcctcgggaaccaaaggggtcgcggtagctctcgatgaacccgatgtaactgggggagagaagggcagaggtggaggaggggcaggcaggagggggcaggtggggtggagctggcgcctcacctctccacgatggggcctttgtcctggatccagaagcgggagcccctcttgtgggcctcgatggagccctgggtgaagctctctatatactgggccagcatctgcccctggtggctgttggctgcataggcctgaggtgagcgggggtcggtcagcctcgggccacccacccacctccacacccgctctgctgcccagaggggtcctcagcccgcacccctcagcccccagccagtccaaccttggctttctccagctgctccaccaccttctggaggatgggcgcgtagtccccccgggtcacctggaaagggcttccccggaattcatagctcttcagcttggaagtcacctcagagtccagggaaggctctggggaaagaaggtgtcattcaagagaaaaggctggagtaagaggcctcactcagagaaaaggcctgagtaagacacctcagccggcttttccccatagcactctttcactctaagattttcaatggctccctgtagccaacagacatgagcataaactctcaacttcaaaaaaatatatatcagccgggcatggtggcttacgcctgtaatcccagcactttgggaggctgagacgggcagatcgcctgaggtctgaagttcgtgaccagtctggccaacatggtgaaaccctgtctctactcaaaatacaaaattagctgggcatggtggtaggtgcctgtcatgccagctactcgggaggctgaggcaagagaatcgcttgaacccgggagacagtggttgcagtgagctgagatcgtgctgctgcactccagcctgggcaacagagaagagactccatctcaaaaaaaaaaaaaacaaaacaaaaaaaacaaaacaaaaccccaaaactaaaaaacaaaaatatatgtatcacataacatgtgctttccgtgtgttaactcctttaagcctgactccaactctgggaggaggcggacattatcatttccatttcaccgatgggaaactaaggcaccgagagcttaagtggatagcaagtggcagactggatttaaaaagacagccacatcccaaatgtaatcgacagtcccatggggagacaagagggtgactgggaggaggagctgtgacgatagcagaggggagctggagtgaagttggggggctggacagccttccagaagctggaaaaggcaaggaagcaggttcttcctgagactccagaaggaatgcggcccagccttgcttttagactctggacctccacaactgtaatagaataagtttgtgttgttttgtgccagtaaatttgtggtaatttgttacagaagcaatgggatgcttacacactactgtattttccttgttgtctctgatcaataaaatatacttcaaggctatgtaaaaacaaacaaacaagcaaaaatagccacagtatttcctgtcttactgcctttttttttttttttagataggatcttgtaaggttgcccagttgatctcagactcctgggctcaagcgatcctcctggctcagcctcctgagtagctgggattacaggtgtgagccatcatatccagctcaactgtgactttgcccatggagatgtgggatctgtgttccctcctcctgaagccaggaaggctgtgacttcagcagcagggacaccatgtgcttaggccaggtcacacaaggtgagcaggcttctgcctggctctcctgggatgctcactcttggagcccagctaccacgaacaataggagggtgccacatgaggtattttagtcaacagcccagctgggttccagccggcagccagcacctgcgtgtgagtcaacaagcctggggatgcttgcggccccaagctgtcgtcttcccagctgaggccccagacatggtcacccagcgaccggctgttcctactgtgctccacctgcattcctgacccagagtccatgagcatgaaaaggtggttttgtatcactaaatttgcggagcatttgttccacagcaatagattatgacccactcgggcagtccggctccagggccacattcaaccactgcccgaaactgcatcttgtactctaagtataggcccagcttatgttccagtgagatccactcctgttcctctgaacccacatctgccatcatctccccagtggatgctcggatccaccaagcgctaggcaccagggagacaacagtggatgaaacacacaggccctcctctcggggagcttgtagtcagggaagctactgaatgtgccgatgggaagaaagaagggcacagactcagttatgggaagatagggaaaggtcctggggaaggcaagtccatgcatggcctagaggatggggaggaggtggccaggggacaaggagaggctggagggggttccgcatgagaagcagggaatggattgtgcaaagacctggacaggggccaggcgcggtggctcacgcctataatccagcacactgggaggccgagaggcacgcggatcacctgaggtcaggagttcaggaccagcctggccaaatggcgaaatctcatctctactaaaaatacaaaaattagccaggtatggtgatgggcacctgcaatcccagctactggggaggctgaggcaggagaattgcttgaacccgggaggcagaggttgcggtgaaccaaggtcgcaccactgcactctagcctgggcactccagcctgggcgatacagcaagactctgtctcaaaaaccaaaaacaaaaagacctagagagggtccatcagaactggatgctgttgagcatggccagagcacagagtctgagtgggaggatgtggagatgaagcaggggctggggtgcgagtgggaacaaagagccaggtggcaaaggtcttcataaaggcctggacacttctgtccatactatttcctctctcctgggaatggaccccaatttccccttgagaataccaccccaggccccactactactaccccaagtgcaggtggtttgggaagggccagcctctttttttttttttttttttccttgatctggagcttcgctctgtcacccaggttggagtgcagtggtaagatctcggctcactgcaacctctcccttccaggtttaagcgattctcctgcctcagtctcccaagtagctggaattacaggcacacgccaccacgcccggctaatttctgtatttttagtagagatggggtttcaccatgttggccaggctggtctcgaactcctgaccttaggtgattcgcccacctttgcctcccaaagtgctgggattacaggtgtgagctgccatgcccggcctgaagggccaacctcatcgcctgactccagggtaggcttgagaccaggttgagccaatcagagacctgtcccttgccagccctcagggattggttcacagacaaataggggactgatttagagaaactagagccattcccaggacttatgtagaaaatcctgggagagaaggatgctctttctgaaggagtggcagagttggtaggacctgagccacccaggtccggaaatgcccaggagggagcagaagggaagcctggggctaagctcacctgagccaagcacagaagccagccgcacctcgtagtagggcttcccttctccatcgacctctttgaagagccgggtgttgtaggcactgaggttctagaagagaccaggacaggggttaagagtgaagtctggagagggcagtggggtgggaggaaggaaaatgggtcaaccctaggggagaaggcatggaggcaaagcaggctgggccttctgggttggctgggagcaggagtgggagagagtgggagtgggcagcccagggccgactctcctgctctgctcaggacactgtgcacttctactaagcactgactgcaaccactggccaggcactgcacggcctctgcgaacccagggctactggaggtgggtaccacttcacagacatggaaactgatcacatggctggtgagtggctgagctgggagcaccactgacacatggaccccggagcctcacacccctgtggcctgaggtcctggttcctcgccctgccctgaggctgtcattaggctctatagcctggggtgggcaggggtcacgccttccctagtacacagggagtagtcaagcagagacccaggagtggtcaccagttgtgagggggctgggactaggaaccccaccaaacctctgctaccttgagctcccctaaccccaaacctgtgagtccagaaagtcctgggccaatttggcatcttccatggtacaattcccagagaaataggtggtgattccctgttggggaagacaggggacatgagaaagaggagttgccaaggtcagggctgcagggacgtcatattcccaggcttcccgcccctccctcctttcagcagcctctaccccttacccctccatctacctccaggggaaaaagttataaaacaaacaaacatgctcatctccagtgttgctgcagctctgcccaggcctctctctggctggcccacccctaaggcttgccaaggtcctcatcccatgcaacggatgtggcctccagaggtgggaaacctgggacccccctccttccctgccatcccctcctcagctccctccacctccagccttcctctccttccctccatcagcacatggcatcctgtgtacagaatgtcagatctgggagggcattcagaaagcattcgacccaacatgcttaccattctacagatgacaaaactgaggcctgcagtggggagcagcattgcctcaggagtgtgaggcagagcccactgcctccccatcccgtgtccttccctccttaccaggtggccttgaaggattccctccactccctgtcccctcgggggagtcaggggcctcacctccttccccagtccgaggtgtcgaagccttggctccagagagaacataagctccccgcaggtctgccagaggcccctgacttcttctgggtgctgctgagcagcctcactccctaggatcacccgttccagcttttcctgcaaggaaagggaggccaatggcccagtcacaccacccaaacctgccttccagagcctccctacccactcccaagctcttctcctatgatctaagagctctggctcattgtgtggtccatggaccagcagcacttgtaggtcctgagaaatgtcaagcgtccatgtgtggtggctcacacctataatcccagcactttgggaggcagaggagggagagatgcttgaggccaggagttcaagacaagcctgggcaacacagagagaccccatctctacaaagaataaaaaaaattaggccagacgcagtggctcatgcctgtaatcctagcatttggggaggccaaagcatgaggattgcttgagcccaggagttcaagaccagcttgggtaacacagtgggattctgtctctacaaaaaatttttaaaaattagccaggtgtcatggtgacaggcatctgtggtaccagctactctggaagctgaggaggatcacctgagcctaggaagttgaggttgcagtgagctgtgtccgtgccactaccctccagcctgagtgacagagtgagaccctatctcaaaaaaagaaaagaaaagaaaagaaaagaaaagaaaatttagctggtgtggtgctgcatacccatattcccaactacttgggaggctaagccaggaggatcacttgagtccaggaggttgatgctgaagtgagtcatgatcacaccactacacttcagcttgggtgacagagcaagaccctgtctcaaagaaaaaatgtcaaatcttgggtccaccacagacctgctgaatcaggatgctgcatgtcagcatgactgccaggtgagctgtgtgtgcatattgaagtcccggctcttatacctgctataagaaccacctctgcccgagataggctcaagtctcataaccctgggagggatcccccggcccagcacttcccactgttcctggtgatgaccaacaagctccatttttgagagcacctaaaagttcacagaacacttccacatctcgcccttgttcagcctgcggatcagcagtcagggcgagtggtgcttttcctttatacacgaagaggccgcagcacccagtgaggctggtgacacccacagtcatgcagggtggaagcgacagggtccatgctctgctcagggcttctgacactccagttggggctccttctactgcattttccatctctaccccaccagccccccatccccaccttccccaaccctcccttggctcaccttgggcaagttgggaacaaacttggtgtcaccaaaggacttgtagttgcccatgttggagtaaacacccgcggcatagaccaggaacgcctgagggggaggcaggcatcagagacccaggaagcacagcctccctgaccccagcgacacctcctcctgagatgcgaatgccccagcagagccagtgtgggtgaggctgggaaatgtgtgggcaggacctaggtcctgggaagccccagtctggcccacactcacttccacagacccattttcacacccccgttgtctggcctaactgatcttctgggcagttcccaaacacacccaagcattcgtctgccttttccctccccaccccagcaccctctcagccacctgaagctactgtgtcctttaaggcccagttccagcagcacctccctctttctccagagcctgtcctcagcctctgacctgtcaggcagctggccttggaagcatcacatgttagagccggagaggcttaatcatctgtctattctatggcttctgctggccccagatcttcctctggtaacaagacctcaatcctccttttgtgggtgggagggtggggtgggggatctcccttcccccagctccaggggtgggcatgtaacctggctcagtcagtctgagaaaccaccatccttggctacaggatggacacaaggctcaagctggcataagagagctacccaggacatttcccattggcaaagagcctctgtacaccagggatcatcaggcctggaactcctggagctcccctccaggagtaagaaaagcaagcaagctgagagacgaagactgcatcccagtggtagcactgagtccgagtccagccatgcctgaaacttcctctagacctggacttttcaagcatgtgacccaacaattctccttttcatgtaagccaatttgagctgggtttctgccacttgcaaacatatgaattcccctaaatggccaggcgtggtggctcacacctgtaatcccaagcactctgggaggccgaggcgggcagatcacgaggtcaggagattgagaccatcctggccaacatggtgaaaccccatctctactaaaaatacagaaattagctgggcgtggtggtgcatgcctgtaataccagctactcaggaggctgaggcaggagaatcgcttgaaccagggagttggaggttgcagtgagctgagattgtgccactgcactccggcctggtgacagagcgagactccgtcccccacaaaaaaaaaaaagaatttccctgaaaataataacgcttgggttgcacctttctgtttataaacatttccacggatattagctcttttaatgagtaagccaaggcctcaagatgggaagtgaatgcccaaagttcaaaagaggtagaataaacagtacatcagctcagagagaaacaatccaatccctttatttcacatatagaaaaacaggccatattcttgtacattcttggtgggaatataatgcagtgaagcttttttagaagatgatttaacagaatcagtcaattgtaaatgtacagagcctttgacccagcagttcttctagaaatagatcctcctcacatgtgtgcacaagtatgctcaccatggcactgtttgtaagaaaaacgggacaagctaaatgtccagtaatgaagattaaattgattatagtgtacactgctgtggaatgctttacagtcaataaaaaagaatgaggtacatttaaatgtaccccattctccaagttcttcaagacatggcattcaatggaaaaagcaggacacaaagcaggaaaagaacattatctcatttctataaaaaagaaaataaggaactgattcaccatgcatatacacataaatgtatgtaatacacagatgggattgaaaaggctgtaaccaaggctgggcacgatggttcacgcctgtaatcccagcactttgggaggctaaggcaagtggatcacttgaggccaggagttcaagaccagactgggcaacatggtgaaaacccacctgtactaaaaatacaaaaattagcccggtgtggtggcacatacctgtagttccagctacttgggaggctgaggcatgagaagtgcttgaacctgggaggtggaggtttgcagtgggccaacattacgccactgcactccagcctgggtgacagaatgagactctgtcacaaaaaaaaaataaaaaataaaaaagagagagaaagaaaaggctgtatcagcctcagtgggttacctctgaggagggcactgagaatgagtgatctttgtgttttcttttgtgtctttctgcattgctgcaatgcactaagaatttgtgtattacttggccaatacatccaaaaacaaaaaccaagggacaggcagaacattctgcccagggccacacagtgtggtagagaagaactggtcctgaactcagacctcctgatacctactctggactccttcttctgccttccctgaatctccaccacagtttcttttgttataatcacagcagccatcatttatcttgaagtcaggcactgttctaagtgggtcatcacaacactaagaggtacagacatcccacatgcatattttacgggtgagaagactgaggctccagagaggggaagtgcctgaatttgtaacctttggtctaatcctccacctaccccttgaaagacacagacatttgcatcctggtctttcacacccagaagccactcaggtaatgtgggttggcccaagagaactgacctgatactcctcctcggtaaggccttcagccagggcatgttggcgcagctggtcggggtcctgggcgcggaagaggcggctgagcagagcatagatgtagggggcctcaggggaggtctgaagcagcacagccaggcctccgtaccaggcggcacgggacaggtggtaggcatagaggcgctctgtgggtgacagcaggcggaaggcctcacggcagtccaggctagacacgccgatgtcattgggcaggatgtactgggtgtccgccatgggccctgctgagaaccatcactgtcatcacagctgttgtttaccccataccaattgcatacctggctctgaactcttatgatctcatttaatcctcccaaaagcccatgtggaagggaatactattgtacccattcaccagatatgctaactgaggcttagagaaggtgagatgactcacccaaggggtcacaaaatacactggtggaccatatttggtctgtagtccctaaaccttaaagattgactctaaggtcaggcatggtggctcacacctgtaatcccagcactttgggaggccgaggtgtgtggatcacctgaggtcaagagttcaagaccagcctgaccaacatggtgaaacctcctttctactaaaaatacaaaaattagccaggcttggtgccaggcacctgtaatctcagctactgggaaggctgaggcaggagaatcacttgaacccaggaggtggaggctgcagtgagctgagaccgcaccattgcactccagcctgggcaacagagtgagactccacctcaaaaaaaaaaaaattgattgactctaactacctagtattacagatggggaaactgaggttcagagaggctaagagccttgcctaatcccacaatggagacatcagcagcagagatcctcatctctaggctcccagcccaggcccctccctgcttccttgttcagtattatttttttaagacggagtctcacttagttgcccaggctggagtgcagtggcatgatcttgactcactgcaacctccgcctcccgggttcaagcgattctcctgcctcagcctccaaagtagttgggactacaggcgtgcatcaccatgcccagctaattttttgtatttttgatagagacggggtctcgctattttgtccaggctggtctcgaactcctggcctcaagcgatctgcttgccttggcctcccaaagtgctgggattacaggcgtgagccaccgcgcctggcctttgttcagaattctttacactttccactgtgctcacaaggataaagtgccaggccgccagctggaaggctcagcctttagccaggactcggccccagactcctaaaagtcaagtccattgcttcacttttctgtacctccgtttcctcctctataaaagagagaataaccccaatattaccaggtgggtgcgctaatcagatgaagtcgccctggacggaaagtatccacagcaataaatgatttggcttgaaactgtcccattctcatccctctaaatgccttttccttggccctccattctcctgctcgctccctgtgctccaccagggaagccacagaagttcacaaccagaagaaagcccattttacagatagggaaactgaggcttggaaagggcaacaatttactgaaggtctgacagccccgttggaacccggggattccccaacccggggcattctccccgccacgccccgtcccggctgggacagagtgtccagcctcctcgccctgccccggcctccagaagccccgccccaatagcacagcctcgaggttcggaaagggctgttaactctttgctccccggagcactccttggcctcgagggcggggtgaatttggagggggtactggagagtgggcagaaagggaacgattttgcgctcagtatggattcgccttggtcccccgggatgacacgctttgaccccaaaagcccaggcgccgcgcctcacctgcagcagctgctccgttcgcaaactcacttcctgcttccggctcccccattcattggggctctgcgaaccccgccccccttggccaactgcctggcctcggggtccggatgggcgtcagtaccagccaatagacgcgccaagacgagcttctcggctcgcccgctcccgcccccaggcgctacggggtggcgcgcggattggccctgcggctcggccttttgtcagcaggccgcacacgcgccggaccgggtaccgctgtgcccggcctggccgcggcctagtcccggcagacgggactgacgaggtcaccaagcccaggccgagacggcgcgggtgtcagggacttgggaatccccctcccccagtcccgatcccgctttcctttggggtttcacctcagaggacccgacagcactcttgcaggtgggaacctacacaataggagtaatgtggctccaccttcctctcgggactcgggacctgggggtggagacttggaagttgcaaagctctcggtgccgggaatcggggctacggttgagtgggatcgggccagggctgaggtggtcccacccgtgtaggggcgcggagaaacgcctcgactgcttcactgtaccaccacccacccgccacgggcctggaaggagccgctaaacattcccgagcctcagtttccttagcacaaacaggctggtagtttcctggtgcttgccagatgcctgatggatgagaaagcctcctgcggccccgaaagggagtccagagcagaggcgggcccgcggtccacttttacaggtctggacggactcacgggaccacggtctgggtggggcatgcggaagggcctaggccaaatggggagtagtggtgagggcccagggtcagactggggggtggagtgaggttgtctgggagtcttggctttatgaaccggaaaaccaggctaataattgaatccaatccaagggatattgtaagttgtgatgtgttgactgcagtgccgctccctatagttgcgcagggtgaggggcgtttgggtactgaaatcccgcacggtctccttgctacgcccgtgtctaggccagacagcctctgcttaccatagacaccagtttctcatccacaaaggtgcccaaggccctgcttgacacaacagtgttacaagctgttagctttgatgattacttgttatatgggggagttcaacaagttggtcggtgtccttaggaaagtcacccctcttctttcctgtgcctccgttttcattgtctttaaaatgggtataaagttggctgacaggtgaagttgaaatgtgcacaggtaagggaggtagtgctgcccactgccagcagggggcagctcaggcaaggaaaagaccccagtgctctcaggaccccccaaccagctacgtgatcacatttttatgatcacagataagatgagcatatactgaggtcccttgctagcagtttggcatggaggacctcatttaattcttgcaaaaatcctgaggtatgatcactttacccattgtacagatagggaaactgaggctaagaggttcgccgactcctataacaccacacagttcagatatccctggccccaacatagagatacacacacacagtcactcacatggagcagtctatcactggagtcataactccccagccttggctcttccccatgggaatgcaaaaggggtcggtgaggagcaacagttacgaatcaactgtgttacaggtgctctctgtatattcacaaccacctggcgaggtagtgactgttatcccctttagcactgaggaaactgaggctctaacagctggcaaaggcagagctgggacaagaccagggctctgacctcctccaccaatacctctgaatcctccccagcatctactgtggtgccctttgctggtctttcctcctagggtctgaggttccccactggaaatgggatcagaatgttcccctgcctggttcccaacagggtcagaagagagaacttggaagagttggattttgagtgctttgtgtgttgtgtgtatgttgaggggagagaagttggaatgctcccacacctcctgcagcatccccaccctccccttcacccccactgcagcagtgccatgctctggaagcaagaatctgatcacaccctcctccttctctcatcacattcgggtgccctctgtcttctcaataacccaggtctgatctccctggccgcaaccagctgtgtggccttggtcaggtccatccctccccttggaatctgtacttccctaggctctgtcatctattggggacgatgcccaggtcaggcctatactcagagccttcttctcttcatctccagaacagccgtctgcctgtcttcctggctcgctccctgcaggaatggtctgggcaaccccagcaacacgcccacctgtggccaggatgaataggaatccagttcaggcttggcttccatggcaatcaaggcccaccaggccccagcaaccttccctaccccccattcctttttgctgcccccctccacaccaggcatgttccctgccacaccatgctgttcccctcacctgggctgccctcccaactcctctctgcctctggagatgctctgccattcaagacttggctcaggctccaggtcctccctgggccttctagagcccctggttctcactcctctgaacacttccagcctgctaatagcccactgcatcctggcctggggtacaggtggccagcacaggtgtgggggccagcttccaacacaagcacgggtaggtccctctgcagaccatgggctgcaagaggcccggccttgcccactgcaggggccctgcgcagggctgggcacgaagcaggtgggtgtccaccaatctagtatccaaaaccctgcttggttcacccccacctctgttgaaggaaagcaacactgtgatggagaggagcagctgtggattcaaatcctggcttggccactttctagttgtgtgacttggtgcatctgccctcatctcctcagagacaaaaatggcaacacctcccttcttgggttactatgaggattaaataacaaaacctccaagaagcagagcccggtgtctggagagtgctcaatggacgtagttattattatcatcatcagcacagtgcggggcacatggtgggcattcagggatgatggcccttgtgtcacagccgacactcttgaccagtgagtcctctctcctccctttgttgactcctgaccgtccacaaatgaggttcagaatcctccatccagcatcttccctggtcacatggtcccaaccttttgctccacccccttctctgttccccccgcagtccatgctccagccatcctgactctgtccctggatttctggcttactgacacctgagcctgtgcacaggccctcccttctgtatagagcacgcttcccatcttgtggacttgcttcccatcttgtggactcggagggttccgagcagccgttgaggctgagctcctatgacacctcctccgtgaagcctccctcacttttccattaccagtgaggcctgccacagcctgatttgtactctgatcctggcacgcatgaagccgtgttgccatttgttaacagtctgtcctccactagactgtgaactccaccagggggggaaccaggtctgattgcctctgtgtccccagataccacttagcacagagtcgagcccatagtggctatcagcaagtgctaggcccagcctgccacccacccaccactcacttgggggctggaggcattgcacgcatgcggggcatgtgggacttgtgggggcagctgagcagcgaggtttatagaggaacccagggcggcagcaggaaggatgaaggatgagtgtctgaaactgggttggcaggctcagggcatagccagcctaagctgggggtcaaaggcccctggccccttcactcccccaggggcacacagtgtcggcggcacgatgtgggatgccccaggaagggcaaggccatggggctgggctttcctccatcgacccaggacagagctggtgctgaaggccccatcagcatgactggggtggagatcttggggacctccttggggggccacagttggggggaagggcacagcccatccaacatgtccatctggtgtggctgtgccagcagggagtgtcccacatgcagagctccctctgggctgcaggaggtggggacctgggtgggcaggtgggcacagcagcagggggccccagggagcctaatccagcgggccctggaaaatgaggcggacgcagccatgctcgccggtaagccaggccccgcaaaaggggcaggcggcatggaaagcatgggtgccgtggggcagtggtgtctgggcccagtagcgggcagtcttctcagagcagacgtggccgcaaggtgcaaaggcatggctaggcggcccagggtccaggcagaggccggcctcctggcaagccatagaggcacataaggccccacaaggcggcagagaggacattcgcgctcctgggggccccgctcccgccggcagccccagccgtggtagccatggacgtgcccgcagcggacgtagacccagggctgctgtttgtcgggcgctgtgcgcccacgggctgggctggggaagcccagagtgctgaggccacggggcactggggcgcgctgcatttgcctcctgccgctggcctccagttgcttcagtgtgggagcccgcagcagccccgccggtgtgcgccacagcagtgtggccccacacaggtcgatgagagagccgtcctgcagcacgttggactcgttttccacttgcagaggcagtagaagggccttactgcccaagaggcccctgctgagccgcgggtccatcccacagagcctccctggagagggcaccctggcgggcagggcaggcagggcagaggagcaaggcaggctaggaggccaagtgggcaggcaggtgcatcccaggcacatgctgatcccccctcccaacggggcatgggccttggtttccccatctgtctaatcaggaagtctgacccagacagggtttttctaaaataagatgttttctgaagtgccctcctcctgacagaggcaggaaaggcctctaatgaggaatgctgggtacttagctcaaagctaacggggaatgctgggtacttagcccaaagcagctgtcccagtagttacagttaaaagcaaaaactcaggagctaggctgcccaggctgaattctggcctcaccgttgactaactgtgtcccttgtcgagtaacttaacctctctccatctcagtttcctcatcctcaagatggactgcaccttctggcatctcaagtggttcttgtgaagattaaatgaatccatcaggccgggtgcggtggctcacgcctgtaatcccagcactttgggaggccgagacgagcgcatcacctgaggtcaggagttccagaccagcctggccaacaaggtgaaaccccatctctactaaaaatacaaaaagttagccaggtgtggtggctcatgcttgtagtcccagctacgtgggaggctgaggcaggcgaatcacttgaacccaggaggcggaggttgcagtgagccaagattgtgccattgcactccagcctgggggatagagtgagactccatctcaaaaaaaataaataaataaataaataaatggatcaatcagtttaaaaacttagaacagtgcgtggcaaatagtgctcaagaagagtaggcttgtgaaacattcacatgcattgttttaacaaacaatgcttccccagacctccccacagagttgacgctctggaaagaaaagccaggcttttctctgaggttttgcatctccttggccaatgtgctcatgccagagaagagcagtgcatggccagtttgaggagcacggccatgtgaccttggacagcccctgcctctctctaggactcactcccggtccctaacctcagctctctgatctgtaccacaaggagctgccactaacacctgtgtcagaactactgtaaggaccctttcctcctgcgagaggagaacagtgctaaacctgtctgaacgtgatagacatgctacaaactgccaaccctttaggctataaactgctcacacatgggccaagtgtcactctcataagaaggtgtgattttttttaagctgccagcagccttgaagccacctgggactgcacagtatgtctgtgtgtgccttgatcgcatcaccccctggacctccagtggtatgcatgctatgcttggggaccctggtctgtctgcctgtctgtgggacaagtggctcatgctaagaaccccctgggcctgggattccctgatatggagcctgttggggctccctggggcagaaggactggagatcatctcctggcttgggcagggggatgggcagcttgtgagggcctggcaaggataggggtggggaatggagcgggccacctaccagcttgccccgctgctgggctgagcggctgtcccgcaatgtgtacacattcccacagaccgagatctcccgccagacacccggggctgagtcctcggagaagccgcctgccgggtgcatcaccaggactccattggtggtcagtccatccatcaggccatctggggtccgccatttggccgctcgctcctgggaccacatgagggatcagatcacatcccccaggggccccccagcaggccatgtgccagaggcactgcccccgctaccttcaagttcagaggcggcccagagaggactggcattgaagctgcatgacttgagcgtctctctgggcctcactttgctcatcagttaggtggggttgctaactgccaggaccaccatttggattactgtgggctggttcatcacctcaagatgctgcacctcccaagcctaccccttgcctcacagatgaagagttggtcccttcctggggctcactcactccaaggaagatgttgctagaggcatcgaagccagcggcatagatgcgggcagtatagggtggccggcggtcacagaggatgcggcaggcatagcgggagatggtgctctgggcagaagggcctcggcagcccctcctccaggggacgtgtctgttaccacgaagtcaatcatgttctctgtggagcggccaatctg

SEQ ID NO: 856 - DNA, 1452 bp, Homo sapiens
ctcaaagctaacggggaatgctgggtacttagcccaaagcagctgtcccagtagttacagttaaaagcaaaaactcaggagctaggctgcccaggctgaattctggcctcaccgttgactaactgtgtcccttgtcgagtaacttaacctctctccatctcagtttcctcatcctcaagatggactgcaccttctggcatctcaagtggttcttgtgaagattaaatgaatccatcaggccgggtgcggtggctcacgcctgtaatcccagcactttgggaggccgagacgagcgcatcacctgaggtcaggagttccagaccagcctggccaacaaggtgaaaccccatctctactaaaaatacaaaaagttagccaggtgtggtggctcatgcttgtagtcccagctacgtgggaggctgaggcaggcgaatcacttgaacccaggaggcggaggttgcagtgagccaagattgtgccattgcactccagcctgggggatagagtgagactccatctcaaaaaaaataaataactaaataaataaatggatcaatcagtttaaaaacttagaacagtgcgtggcaaatagtgctcaagaagagtaggcttgtgaaacattcacatgcattgttttaacaaacaatgcttccccagacctccccacagagttgacgctctggaaagaaaagccaggcttttctctgaggttttgcatctccttggccaatgtgctcatgccagagaagagcagtgcatggccagtttgaggagcacggccatgtgaccttggacagcccctgcctctctctaggactcactcccggtccctaacctcagctctctgatctgtaccacaaggagctgccactaacacctgtgtcagaactactgtaaggaccctttcctcctgcgagaggagaacagtgctaaacctgtctgaacgtgatagacatgctacaaactgccaaccctttaggctataaactgctcacacatgggccaagtgtcactctcataagaaggtgtgattttttttaagctgccagcagccttgaagccacctgggactgcacagtatgtctgtgtgtgccttgatcgcatcaccccctggacctccagtggtatgcatgctatgcttggggaccctggtctgtctgcctgtctgtgggacaagtggctcatgctaagaaccccctgggcctgggattccctgatatggagcctgttggggctccctggggcagaaggactggagatcatctcctggcttgggcagggggatgggcagcttgtgagggcctggcaaggataggggtggggaatggagcgggccacctaccagcttgccccgctgctgggctgagcggctgtcccgcaatgtgtacacattcccacagaccgagatctcccgccagacacccggggctgagtcctcggagaagccgcctg

SEQ ID NO: 857 - DNA, 154 bp, Homo sapiens
ctgagcatacctggaacatgtctgtgtcgctatcatgtgtatactccactatgaccgagtggctccgggacagtgtatacgagatgctgtgctgaccacggttactcagtgcctggtggggagaaaaaagtcacttgccagggtgtgcagccat

SEQ ID NO: 858 - DNA, 196 bp, Homo sapiens
caaggaagatgttgctagaggcatcgaagccagcggcatagatgcgggcagtatagggtggccggcggtcacagaggatgcggcaggcatagcgggagatggtgctctgggcagaagggccctcggcagcccctcctccaggggacgtgtctgttaccacgaagtcaatcatgttctctgtggagcggccaatctg

SEQ ID NO: 859 - DNA, 282 bp, Homo sapiens
gtggctcacgcctgtaatcccagcactttgggaggccgaggcaggcagatcacgaggtcaggagatcgagaccatcctggctaacacggtgaaaccctgtctccactaaaaatacaaaaaattagccgggcatggtggcgggcacctgtagtccctgctactcgggaggcagaggcaggagaatggtgtgaacccaggaggcggagtttgcagtgagcacagatcacgccactgcactccagcctgggcgacagagcgagaccctgtctcaaaaaaaaaaaa

SEQ ID NO: 860 - DNA, 873 bp, Homo sapiens
tacagtgagccactgagtttattcagaaggttacgttctcagcctttattccagggcccaattttcaagacaagccttcgcgggacaggaggagtcctctgaagatagcagtgcatgagcagagaaacacacatggcttggtctcgccgcccagcagctgattccgaggaggggctgagaggggccaatttcacccttccctagcaagactcggaggaggttcttcctacacaagaagcccatctgaccaccagggcttcctggcagagagtggtgctagatgtcagccaggaactccccagaccaggtattcttccaggctcaggcataaagaaccaggaggcttttattttctattaatcaacctagttggaagcagagccattgtaaaggcagagaggtattgattacaggattaaagaaggaaaacgctgcttatacaatgtgctgttcagcagaagcctcccctggatacttgaataaaatcctcggtaagggtcgcctgcagtcactgggcactttctattgtactagctcccatacagcaacatttctagcagcagaaaagcaggaaaaccactctccagggagaggttcctgccctgtcctggccccaaattacctggcaccaggctatcacactccaccaatacttcgctggcctgggttttcaggggtggcacgatgatggttcgggggttccccgtgcagtgattctccaggctccccttggtgtcaaaggcattggcattgttgtgcccagcacgctgctgcacggagtaggggctggtgttgctggaggagtcggagtagggggagtcgtggactgtgacacagctgatgacgttttttctttgcttggagacagtgctg

SEQ ID NO: 861 - DNA, 873 bp, Homo sapiens; identical to SEQ ID NO: 860

SEQ ID NO: 862 - DNA, 934 bp, Homo sapiens
ttcgaggtttgcacaaacatatatttaaggaacttaaataatgatacaagacaaattctatcctttgcaaatatttaaacttaaaaatgtgtgctgcatatacccttaaacaatatttaaaggatagctgagctgaaaagtatgcagctctctttaaggaatcctggctcccgggaatgacttcgggtgcctcccagggccctttggttactgctagagaatgttgcttcctggcagggtttccaccaaaacatttgcccgggtggaaaaagatggtttttggagagagatgtccttgtagccttgtggaagggacagcttcattttcttttcctcacagagatgcctaattttgggagggctccagcctgcttctctggccccaggtcaccagaccctagcagcaagtacagcctggcccctgtcaaccagaatgctcgccctggcatgtggcactgctgtggctctatttttcctgaaggtaaggtctccttcttccgagagagcacagcgcgagctgcgtgctgcttgtgtgtctttctcgctgtaggcaccacgaccccctgcccccaggcccacaggagcgctggctctgatgtcaaagctgcttggaggctgcatcgtcatgacggtactgttggggacagaccaggacttgcaaaaggagacgttttagcagggtgctgagaagctgcatttcacaagcatttcttcagaggaaaggtagctggggtaactccaaagtcagggaaaaagagcttcgccgcaaatgtcggaaagggtgatgctgccttgggttaggaagtaggtggcggggagcgcaagcctgtggctgtcaccatctcccctttaggcagagcctctcagcaaaaggggccccatcccaggcaatgccatgagctcttgggagagcgtgccagggctctgaccctca

SEQ ID NO: 863 - DNA, 934 bp, Homo sapiens
ttcgaggtttgcacaaacatatatttaaggaacttaaataatgatacaagacaaattctatcctttgcaaatatttaaacttaaaaatgtgtgctgcatatacccttaaacaatatttaaaggatagctgagctgaaaagtatgcagctctctttaaggaatcctggctcccgggaatgacttcgggtgcctcccagggccctttggttactgctagagaatgttgcttcctggcagggtttccaccaaaacatttgcccgggtggaaaaagatggtttttggagagagatgtccttgtagccttgtggaagggacagcttcattttcttttcctcacagagatgcctaattttgggagggctccagcctgcttctctggccccaggtcaccagaccctagcagcaagtacagcctggcccctgtcaaccagaatgctcgccctggcatgtggcactgctgtggctctatttttcctgaaggtaaggtctccttcttccgagagagcacagcgcgagctgcgtgctgcttgtgtgtctttctcgctgtaggcaccacgaccccctgcccccaggcccacaggagcgctggctctgatgtcaaagctgcttggaggctgcatcgtcatgacggtactgttggggacagaccaggacttgcaaaaggagacgttttagcagggtgctgagaagctgcatttcacaagcatttcttcagaggaaaggtagctggggtaactccaaagtcagggaaaaagagcttcgccgcaaatgtcggaaagggtgatgctgccttgggttaggaagtaggtggcggggagcgcaacgctgtggctgtcaccatctcccctttaggcagagcctctcagcaaaaggggccccatcccaggcaatgccatgagctcttgggagagcgtgccagggctctgaccctca

SEQ ID NO: 864 - DNA, 466 bp, Homo sapiens
ctaagagactaaagacaggggcgtggaggggcggagctgggcggggggcgcctcatgaaggccgggctgggtgtcccaaaccagggccacggaagggcagcgggaaggaggcgtgcgggtcgtaggggctgaggggcaggtgttgggggcggaatgggagggacccgggacctcgcatgcatgaagctgcaggcccggggcgccctagtgtttgagaggacgcgcgatgcatacctgaacctgggtgcgagccgcacgtgccgccatctgcttcagggtgctgggctttgaccaggtggctggcagcgccagttgaaagcggttgagcaggcagggcgcagtcgtcacgcctgtaatcccagcactttgggagaccaaggcgggccgatcacggggtcaggagatggagaccatcctgctaacagggtgaaaccgcgtctctactaaacatacaaaaaaaaaaaaa

SEQ ID NO: 865 - DNA, 128 bp, Homo sapiens
aattagccgggtgcggtggcgggcgcctgtagtcccagctactccggaggctgaggcaggagaatggcgtgaacccaggagatggagcttgcagtgagccgagatcgcgccaccgcactctagcctgg

SEQ ID NO: 866 - DNA, 373 bp, Homo sapiens
aaagagggaagatttatgtacatctattttttaaaatactaccagagggatatataagaaattggtaacaggctgggcatggtggctcacgcctgtaatcccaacactgggaggccaaagtggacaaattgctagagcccaggagttcaagactagtgtgggcaacacggcaaagcactgtctctagaaaaaatacaaaaaattagccaggtgtggtggtgcacacctctagtcccagctactcagagggctgaggtgggaggatcacctgttcccaggaggttgagactgcagtaagccatgattgtgccactgcattccagcctgggcaacagagtgagactatatctggaaaaaaaaaaaaaaaaaggcc

SEQ ID NO: 867 - DNA, 1611 bp, Homo sapiens
attctgagtcaatctattttattgaccaaaagattcctgtggaaacaggaggtgagtgccctaagccctcactccttagcactctgcgtgctgatgtagtcctggagaagcgcctgcgcctccatccgccggctcatcttggtggccttgccctgaaaacggcctttcttccctgctcctttgccttccaggacctcagccaccctggggaacagaggtatagtcagggagactttgagggaaaagtcacaaaaaaaaacaagggcagctctgagtctttttccagggactgggagagggataagaagagtagatgacttctaggaatctttcttgaaaacacttgcacataggctgggcatggtggctcacacctgtaatcccagcactttgggaggccaaagtgggtggatcacctgaggtcaggacttcaagaccagcctgaccaataggatgaaaccccgtctctactaaaaataaaaaaatcagccgggcatggtggtatgcgccataatcccagctactcaggaagctgagacaggagaattgcttgaacccgggaggcagaggttgcagtgagccgagatggtgccattgcactccagcctgggcaacaagagtgaaactttgtctcaaaaaaacacttgcacatatgcacaaagatatatgtaccatcatcacataagagtgaataactggaaacaacatcagtgtctatgaattgggctagataaattatgttaatctccagagagcagggtgagcacctgtaatcccagcactttgggagggcaaggcaggtggatcacttgaggtcaggagttcgagaccagcctggccaacatggtgaaaccctatctgtactaaaaatacaaaaaattggacgggtatggttatgtgcacctgtaatcccagctacttgagtggctgaggcaggaaaattgcttaaacctgggaggtggtggctgcagtgagctgagtagcctgggctctccaggctgggcaacagactaagactccatctcaaaaaacaaaaacaaacacatttcataaaaacaaaaacaaaaacatacatgtgagatgtggagccaaaagaccttcaactgtcaaactggaaatgacagtagtaataattatctctgctcagcccacctcacatgcccatgatgtgaattaaatgagatcgcagatgtgatggtcctttgactcagtaaaggaatgtatttgtaggatacaggctctactacatgtgcaagagagtccacaaagaattacctgggccccagggtctccacagacgcaggtggccctgccagtaagaagagtccaccacctttctcatcgcccacagttaagaacaggagggtctcctaggaggtaagacaaggagataagccctgatactgaaggatgtagagtcaaccccccaaatcctgcactctcttcaatcttaagaatagattatttccccctaaaccaccaagtgacgctcctgatgaatgatgatacagcccctccacactggcccacgagggccaagaaactttttgagagcaactatgggaacttaggtgaaacattaagaaggcagcagaagactgctgatcctgg

SEQ ID NO: 868 - DNA, 208 bp, Homo sapiens
gggctgggtgcggaggctcatgcctgtaatcccagcactttgggaggctgaggcaggcggatcacctgaggtcaggagttcgagaccagcctggccaacatggtgaaaccccatctctactaaaaatacaaaatattagctgggtgggatggcaggcgcctgtaatcccagctactcgggaggctgaggcaggagaatcacttgaacc

SEQ ID NO: 869 - DNA, 360 bp, Homo sapiens
agctgtggtccctgcaaaggccaagagcactctgaggaaacatcagtacctggggaggcagtgtgtggtacccagcggagtgtgtgatgggtgatgggcatgggcggaacactcacacagaagtggcagcgtgccacaggggtggctgcaggggtggccatgcctggggaaacgcgactgcctggtttgtcagtgggccctgtaggacagcagtgaggcacctcccaggcagctctgcaagtggcactccaaaggagagctggagaatagaggagggaaaaatgggaattccttgagtcataattgggtagagctttagaaggggttgaaggtcataagtgggaaacatgagcctagaaa

SEQ ID NO: 870 - DNA, 245 bp, Homo sapiens
aataagttagccaagtgtggtggtctacctgtaatcttagctacttgggaggctgaggttggaggattgcttgagcacagaagtttgaggctgcagtgagctatgattgtgccattgtactccaatctgggtgacagagtgagaccctgactcttaaaaaaaaaaattctgttgtttataagccacccagtttatgacttttggtatagcagcttgaatgaactaagtaggtatgttttctaagt

SEQ ID NO: 871 - DNA, 246 bp, Homo sapiens
aataagttagccaagtgtggtggtctacctgtaatcttagctacttgggaggctgaggttggaggattgcttgagcacagaagtttgaggctgcagtgagctatgattgtgccattgtactccaatctgggtgacagagtgagaccctgactcttaaaaaaaaaaaattctgttgtttataagccacccagtttatgacttttggtatagcagcttgaatgaactaagtaggtatgttttctaagt

SEQ ID NO: 872 - DNA, 576 bp, Homo sapiens
tttagtgttatgatgtcttttaaaccacagtttatgcctctatcccttttttttccttagtttttatgttgaagaacccagggagagttaaccaaagtttgaattttactgattgtacactcatgttgcatctttcttcattccttgtatattttgcaaattggttactgaactcagagacttggtcagactctggttcggtctctttagcaatactgtaggcagtgttgtgttctttcatggggaggcagaagtctggttttctcttttttttaaatcatgtccgcagttgttgggctcagtgcccagatccattaatttatcaatggtttaaaaatagtgacattctaattgtgtgggtttttttaaaattttttgttggaatacttttattaagagatgcttctgcttacctgctgttcagttatccagtggcacagttatataggaaaggtaggatatatacttgattctttgcctttatttattcttttttcaaaatagtgacttagttccctattattctctaagagaaccagctatttaatttaatttaattaattaatttttttgaga

SEQ ID NO: 873 - DNA, 576 bp, Homo sapiens; identical to SEQ ID NO: 872

SEQ ID NO: 874 - DNA, 19696 bp, Homo sapiens
gcacaaacctttcaagaaaagaaaagaaagatgtaccagtaggtattgatagtcataagttctacttgtatttgtttcctttttaactgttaagttagttttatgcttacaattagtgacactatagcactagtatattttacaattactatattgatattttagtatattaattataatggtgaatagattatttaaatcttgaaaaaagtaacttagctatggtaaacttgaatgatggctttttatcgtttacattatttagaccaatttgttatgtagtacgttataaaacatcttctttatacagataaatgcttagtattcttgtgattattcacaaaataactattattattctcattgaggataattgattcttgatagtttctcttacagtctcatgaagttacggaaagaaggacatagataaagaaagctgtagcttctaccccaggacaaatttctaactatagatcaggggtccctaacccctgggccgcagaccagtaatggtcagtggcctgttaggaaccaggccacacagcaggaggtgagcagtgggcaagtgagcattaccgcctgagctccaccttctgtcaggtcagctgcagcattagattctcgtagtgcaaaccctgttgtgaagtgtgcatgcaagggatctaggttgcacgctgcttacacgaatgtaactaatgcctgattatctgaggtggaacagtttcatccccaaaacatccctccccttcaacccccatctgtggaaaaattgtcttccacgaaaccagtccctgatgccgaaaaggttggggaaccactgttagagattacataagtagtgacattgctgctcttacttaccacttcaagaaaggtgaaattagtcttagcagctactcctatcacaaatgttagctaaaacatcagaactattaaaacataaatgttattcatcagggatcataagagatgaaacattttaaacatttgtaaagaattgacttacaatcactggaagacattcaactatcatcatagaatttaaaatagtagaaaatccttaaaatccccaatatctcaacagatgtcaacaagatgaatagggttttttggaagtttttgtatatactaatatttgttatttttatagaaatttctagtatattcggtatgtttgtctagtacattcagtatgctatggtttctgcagtaagcacatcactagagtcttttgtgctatatctgtttaactttttaaaaatatttcactatacaatatgacatattattcttaaaattcacataaagtatttggtgttattcattgtaatttctgaaatttaggaatgggttttatgaagttctgtccaactgagcagtgcctttttgctttcaacaatttaaattttaatagacctgctaacataatagtacaaaaatgcagctgagtgactgtaacacagtataaaataaatagcctttgagagatgtaaactttttttttaacctttccaatggtactaagtaaacattttttatgtatgcatttttagttcactttttctgttaacttacttcattaagataaggaactgtttcagtaattctgaaataaatatgtccatggctctatcataggataaacagtatcagtgatatattgaagcatgcttacagtttatgctgtaattcttgaaattatttacagccgtcacatctgtaatcccagtgctttcagtggaaaaggcaaggggatcacttgagagcagaagttcaagaccagcctgggcaacatagcaaaaccctgtctctacaaaaaataaaaatttagccagacatggtggcatgcacccataatcctagctgctcaggaggctgagacaggagaatcacatgagcccaggaggttgaggttaaagtgagctatgcttgcctgccactgcactccagcctgggtgacagagcaagaccatatctctaaaaaaaattaaatgataataaataataaatttattttattttatttatttatttattcattttgagatggagtctcgctctgtcgcccaggccagagtgcagtggcgcaattttggctcactgcaacctccaccttctgggttcaagtgattctcctgcctcagcctcctgagtagctgggattacaggtgcacgccaccacgcctggctactttttgtatttttagtacagacggagtttcaccatgttggtcaggctggtctcgaatccttgacctcatgatctgcctacctcagcctcccaaagtgctgggattacaggcgtgagccactgcgcccagccttatttattttaaataatatttacaaccagttctattagtgcttaggttaaatctgagagttataacactcagagctccctaatttaaaatgatgttttgctaggccgggcacagtggctcacacctataatccgtacactttgggaggccaagacaggtggatcatttaaggccaggagttcaaaaccaacctcgccaacatggtaaaaccccatctctactacaaatacagaaacagccgggtgtggtggcaggcgcctgtaatctcagctactcaggaggctgaggcacgagaatcacttgaacctgggaggcagaggttgcagtgacccgatatcgtgcccctgcactccagcctgggtaacagagcaagactgtctcaaaaaaaataaaaaaacaacaacaaaaaaagatgttttgctaaaatagatgacatcagataatttaataacatcaatataagaaaaaatatatattatttgcataatggaataaaaaggtatcagaaattattggcaataataagatgtgcgcatcctcaaaaatatatctacaaagtatgtcattttaatttcagaaatgttatatttttatgttgtatatatgaaatcaattaacagtagcttttttattagttttcatctcattgtttaagtgattctgatgtatggcagctctagggaaaaattagaatgtcattccttaaaatgatgttactgagattaaccttgaaagaaatgtagactgtcacaaagttcatgtttaaagtatacccagggggttccctctcaggggacagttcgtatactcaagaatgtggccacttggagaaatatctggcattcttcagcatagtgtgggtgagcaaatgtgttacatttcttctccttataattgcctgtatactctaaccaatgattaatatatttgaattcatcaaaatttggaacttcacttagcaaaactcattgtaaacatggtgaagattatctacacaaggagaaactatttgttgtatatatataacagataaaatactcaaacctagaatatatttttaaaagctccaacaaatagatatgaaaaaagataactcagttaaaaaaaatgggaaaagaattcacaaaagaggaaatacagatagcaaataaacactgggttaaaaagattcttaatcttcctagcagtcagaggcatgcaaattaatgaggagcacaggagaaaaggttttttactaatcagcttggtgatattgctgtgagactagaaagaaccaggagctctcatacattgctggtgggtgtgatgtgatatgtacactctgaaaagcagtttgacagtcaatatgcactaaaatgtaaaagatagagaccctgtgtatcagtagtttctcagtatacccatactgcggtatacttctcacagtataccaataaaggcatccactcatacactgtgtaagtaggtatatacaggaaagtttatttcagcatctgtgttctagtaaaatattgacaataatctaaataccgaataatgtttaaggatagctaaataaagtatatttatgccatgctgcagttaaaacaaatgaactaagtctacatgaccgatatggattactgtccaattttaaggcaaagatcctgcagatagtgtataactatttgtgttttaaattcctaacacacacacaaacactattttctatgggaacatgtatttacatatataccaaaaatgtctggaaagccatatgattacataagtatatctaattcactagagaaagatttggaaggttttacaccaaactagtttttctggggcaagtactagaaatagtgcattgtgaaagaattatggggaacttcagccttaactgtaatgttttgttttacaaagaatgtattcatgtattttatttgaataaatgtgtttgaaatacagtattattatatcaaacagcagcaaaaaaagtgtaatcatacatgtgttctttttctagaagcctattagtaatggtcttcctccaacacctaaagtgcatgtaagtactaaatatggagtaggctaagtttcaagctaagtcacttgtgtgtgttatctttgcttaggtttttttgtctgtttgaaagaactttcattattattgaaaaaaaatctataagattgctaatttaattacaggcatgtgtcaccatgccccgctaatttttgtatttttaatagagacagagtttcaccatgttggccaggctggtctcgaattcctggcctcaagtgatctgcccaccttggcttcccaaagtgctgtgattataggcataaactaccatgcctgccctttttctttttttttttttttgagacggagtctcactctgttgcccaggctagagtgcagtggcataatctcagctcattgcaagctccacctcccaggttcatgccattctcctgcctcagcctctcgagtagctgggactataggtgcctgccaccatgcctggctaattttttgtgtgtttttatagagacgggttttaccatattggccaggctggtcttgaacttctgacctcaggtgatgtgtgcacctcggcctcccaaagtgctgggatcacaagtgtgagccaccacgccttgccgttttttacctttaaattctactttttaattagcacagagtatactttataaactgtatgttacaaaatatatatactttatatttgtaatttatataatacttaaattataaatattttaaaataattttaatattgatttatacagtatactttatattatatagcatatatattacagcagagaaatacataaaatagggcagattttcccacttgactgtaagataaaacacttacctcaggcttgcagtttgacagggaaaagctatctgtggaatgccaggtagactccagctatacaaattagcttaagattgggaactggcttgattgttttgttcttcgttttgtcatttaaatttctaggggttagcagtaccctaacacagaaatttccgtagctgtcttaaaaggtcgttattagggttagttaaatgatagtttctgccctacatcctaaagacatgtttctattggtctgctactacttgatggtattgccaagctaaattgttcttttttggtaccagagtctttaaagatatattgtttggtagatttctgtcattaaaagggaaattttaaggtccatgttttaattatgttaatatttttaatccattattgtcaactagtgatgttttcgttcagtatgttacctccgtgtttgtgaggaagacattccttctataaaatgatgcacaaatgctgttcttttaatttaggccaacatggcaaatactgaaattttctctgaccaaaaatatttttgtactgtttttccctcaagttgtcagtagtaaaagtgattacctgagtcaacattcttgtaccttgagtatttaaccagaaggataatttcagagttaatattttgctctttgataatataaagttcaaatgggtgatatatttcattatgatatatttattatctgaaaagtttgtaaatggacttgataagtaatattaacatcaaagagttaagctttttaatgaatctttccagggaaataatcagattgcttaattgaaaaaaataaaaataaaagtctgtgtttggaggttgaagcacatatatgaatttcaaatcagccatacctgtttcagtttgtaatgtgaaattcaatttttaataccatttttaggctcataaaaccaaacaagaaaaatgtcttcctttgtagagattatgatttcctttttaccagagactattgtattgctcttgacatggagcatgtaagatacattattatgcagaattggttcctattattgctttgtttagttgaaaagatagaaaaaataagaccttttttttttctcttttttccaagtaaaattattgtggcacctggaaacttgtggtaccactgttaggcaaatgactatgatgatttcttacacttacttctgtaaatttgaagatgatcataatttcagtatactatctatagactctcacattaaaatagataatagttacattttatatattaaagactgttacttgtcactgtttcatattggttattctttgtttccctagatgggtgcatgtttttcaaaagtttttaatgggtgtcccttgaaaattcactgtgcatcatcatggataaacccagatacaagaggtagtattgtgtgtttttatctgttatcttcctaattttttaaaactggggccatgaaagcatttgtgattttgtttattttctgagtatctttctggggaaaaaaagttttgttataattttttttttattttaaggtaaatatgtttctttgtgctgttatcagtgtttgaggtgacacataacattaaaatttcactgtatagttaccatatcagtatagtgaagccatgtattctgagccaccctagtttcctccagaaatgtttctgctgctgctgcacagtagtctggtatctttttttattttttatttatagggaaaatgttttgctctgccacccaggctagagtacagtggcatgatcatggctcactataacctcaaacttctggccttatgcaatccccctgcctcagccacccgagtagctaggactggaggcacatgccaccattcctagctgtttttgttttttaattttttgtagagatgggagctgtctgtgttccccaggctggtctcgaagtcctgggctcaagcagttgtcgcctcagcctcccaaagtgctgagattacagacaggagccactggccagtagcttcatttttttcaaaacagccattatggaaggaatttagctaccaaggatccggggtttagtgaccactttagaggatctctgaccttaaaaggggccataatcacaacagttgtccttaggcaaccactaagaactgtctgtgtcctctcactgtatatctgattcttaatagctgtctatgtaagatacacatagaacatttatacgtgaacatttttatatacatacacatacactcattaaatatgctgagtacttttatgtcataggcaaggaaattggcactcagagaggttcattgtttatagccaattggtgctagaaagggtcagtttaaatccaatactgtctgaccacaaatcttatgccattaatctcccagtactaatcttaaattctgggcactttaggaatgctcttagcattctatactgttctcagcgtacttcagtttagcctagttagtctagaaaagttcttgacctgtattatcttaaaaacagatcgggcacttttcttcaagttgcctgcttggatctcttggaagtgttctttcctttctttcctgttctaaagtctttttaataaatttccactcctgctcctgctctgggaaacaaacaaacaaacaaaaaaatggaaaggacgatggccatgcttctcatatcttttagaagatactgagtaccctagcaggtatccaagttttagttaactttttaatagactgtggtcagattctggggttttttaaattagagtacttatagtatagctctgaaaaaaaattctgtagaaataattagaatctgtatcagccactctcgattttatattctgtatgtcagttgcacatgatcctgtctttagggggttttagaaaaaggagctgcagatcctttgccagttcttagcattctctgatgagtgaagaatctactatgccactcttcagaacctcccttacataaaaattctcttcactgctttgaggctaatgtttacatataattcagtttatgggtctaaagtgtctaacctctttgtattcactgcttataaatcatagtaattcttgttttatatgttaatacttatttacggaagtttagattatagaaatcctatttaaaaatattttatttaccaaaatcagtcagtgaattacttttatttcagatcagtacttgatatttggtgccgaagaagggatttataccctcaatcttaatgaacttcatgaaacatcaatggaacaggtatgttattttgtatattctttttttttttaatttttaagttaccataagtacacattagaccagaaataaggttcagtttcatgacttgctgcctcttttattcttttttgttttgttttgttttgttttttgagaccaagtctcactcttgttgcccaggctgcagtgcagtggtgtgatctcggctcactgcaaccagtttcaagcaattctcatgcctcagcctcccaagtagctgggagtagaggcacgcaccaccacgcccagccaatttttgtgtttttagtagagacagggtttcaccatgttggccaggctggtcttgaactcctgacctcaggtgatctgcccgcctcggcctcccagtgtgctgggattatagacatgagccaccatgcctggctaatttttgtgtttttagtagagatagggtttcaccatgttgcccatgctggtctggaactcctggcctcaagtgctgggattatagatatgagccaccccaccccagcgtcttttattcttaaaatcctcatgacgccgagcatggtggctcacgcctgtaatcccagcactttgtgaggccaaggcaggcagatcacctgaggtcaggagttcgagaccagcctggccaacatggtgaaaccctgtctctactaaaaaatataaaaattagctgggcatggtggcctgtgcctataatcccaactgcttcgaaggctgagacaggagagtcacttgaacccgggaggaggaggttacagtgagccgagattacgccattgcactccagcctgggcaacaaaagtgaaactccacctcaaaaaaaaaaccttctggagcatgttctaattaccagatactgaagacaggttaacaggactagtccatacccttgagaagctcatgatctaatagggaaaacaggtgtataaaccagtaactacagcactcaggattagatgtcatattaggaatgagtataagatattggccacagaggtggatgtcaccagcacctcctgtggggagatgagtagaggcatttgagatggaccttaaattatgatgaatagaagtttgtcacacagacaggataagcatgatggcatagagatgtgaaatagcatggcaagtttgggaacaatgactgggcatttgactggagtacagaatggtaacaatagatggagctgggtaggcaggcagaagccaaacaccagagcttggtgtactatgctgatggaacagacctgtgttttagaaatatctgtttgcagtacggtgagagatgagactagaaaccatggtcaaatggtaaaagagtgttaattcagggcaaaggtagagaacagaggggaaaagatatttttcaaaaacagttttatcgagatataattcacatatcatacagttcacccacttaaagggtacaattcagtggcttttagtacgttcacagcgttgtgcagccattacaccatcagttttaggacatttttatcatctccaaaagaacctccgtaatcattagtggtcattccccatttctctcctcctctcccccagtatggggatgtttttgagtgtcacaatgagtggggggagcttttatcatttagtacccacgagtcaggaacataaaacaacctacaaactgataataatggtgatgctattaatagctaatacttacataaagcttactatgtgtccacgcagtgtttttaaatgcttgacatatattatttagtcttcatgaaatctctcacaggtagacaccattgataatctcacttcacggatgagaaaactaaagcaccgaaaggattagtaacttgccaaagactccatagctattcagtggctggactgcgatatgaacctaggcaagctagctccagattccatgtgcttaactacttcaccatattctctctaccgattgtatagttcctgtagagaaatgctggacctagagaaagatcagagatctagaattgaccgaattgaatgaccgtttcaacatggaggttgaagagaggtctaggttaactttaggttttccacttgagtgactgggtgcctgacagtaacagaaagatggagtatagtatactgaaggatgtgttgatttgaagagaatggtaatgctttcaatttggtcatactgagtttggggtgccttcgggatgtgtgactaattcttttatcaatataaatcgattacaaggccggccgtggtggctcatgcctgtaatcccagcactttgggaggccgaggtgggtggtcacctgaggtcaggagttcgacaccagcctaacaaataaggtgaaaccccgtccctattaaaaatacaaaaattagccaagcatggtcatgtgcagctgtagtcccagctactcaggaggctgagacaggagaatcacttaaacccgggaggcggaggttgcagtgagccgagatcacgccactgcactccagcctgggcaacggagtgagactccatctcaaaacaaaataaaaataaaaataaattgattacaaataaaatggaaagaaaaatatataagtaatgatttattcatgactaaacagtttcatcttcattttttaaatcaaattttctagcaagatcctaaactgtatgatatactgtaaatcttttaatctggaaatggtgtacagtgaaatggctgaaaagtgcctaagaacagggaaagggaggaaaaggatcttgtaattataataattagtaaataattcaaaggtggtcatatttttattgggtataatgagatatccaaaaataatattggtaacaatattaattgtaaggaataaggccagctttatgcataggtggagtaagcatttatcaacctaatttgaagaactcttttgttgttgttgttatttttgagacagggtttcattctgtcacccaggctggagggcagtggcgtgaacacagctcactgcagccttgacctcctgggctcaagtgacccacctcagcgttctcagtagctgggactacagccacatgccacaatgcccagctaattttttgatattttgtagagactgggatttcactttgttgcccaggctggtctcaaacttctgggctccagcagtccttctgccttacccacccagtgctgggattacaggtgtgagtcaccaggcctggccaggactcttgagagaaggcacccatcaaccacacctagccccagtctgcaataacttcccttcttagttgctttagcatttgaattacattactagagtaattttttttgaaacattgcccttcaaaggaaacatttttccctcctagagggagcctataagagtaaagaattagtatatgtggagcctgaatttttcatcttactgtgaaattgatgattaggttgattttctctagactttataggaaacagggtggcgtgagcctactaaataggggaagattctgaaaagtgagaagatgacactaatcagggtcctgatttaaagttttttatctgcttttattatttatagctaacatttattcagtactcagcactcttctaagtgctttacaaggagtatcttgtttaattactattcagctctatgagatacaggtattctgttttacagataagaacactgagacagagattcagtaaattacccaagatcacacaatcattgataaaacagatatatgagtctaggcagaatatagaagctacccttcttaactgttatattcttatttattaaactgatcatttcacctagaacctaactcactaaaggaagaaagcattgaaaatctagtaaagctttagatttgtaaaagttgttaaaaatgaaaattcagggtcaggcgcgatggctcatgcctgtaatccctgcactttgggaggccgaggtgagtggatcatgaggtcaggagatcgagaccatcctggctaacacggtgaaaccccgtctctactaaaaatacaaaaaaaaaattagccgggcgtggtggcgggcgcctgtagtcccagctactcgggaggctgaggcaggagaagggcgtgaacctgggaggcggagcttgcagtgagcggagatcgcgccactgcactccagcctgggcaacacagcgagactccatctcaaaaaaaaaaaaagagagagaaagaaaattcaaaatgaaatccagtactttttaaataaaactatacataaataccttttcattgtccctatgttgaaaatatgaaaggaatttgtgtcttgtcttgctactttatatatgtttatattaaataagcaaacctacttacatttggaagtatataattttatagtaaaccatcgatgtagtatcagatacttttttagtggatatgtgtatgaaaacccagttcaacactgaattaaataaaaatctgtatcttgctactttgataacacgtactgatatgtggtctggaataagtcattgccccttctctacctgattttttcagtatagccaatgaagtcccaattttgttgtgaattttttgtgaaaagcagaaagtaggaaatggatgttgataacttctctatttgaggcacaggtataggcacattttacaaattaaaaaactgtattggcaatgccacattttagttgtttggagaaattggttattttatgtaagtacattttcccagtaaatgaaataaaatttttattaaaatgttactttgtttctcctcccttttattattaccttttctcttttagttattcagtcccattattatggctgtgtttccataaagtaatgtccttagaggccttgatgtgtttcatcattcacccctgggtcctctctattccattctctcatctcaattagttttggagtaacttagttgtaggaattgccagagcaaacccagcaacaaaggttgttaaatcaggatgtctaattatgtacatcagtggctctcaaacttcagtctgcctcagaattacttggaggcctagttaaaccatagattcctgggtcctccttcagaacttcttgcttcagtagatctggggtgaggtccaagaatttacatttctaccatgtgcccaggtgttgttgaagctgctggtccaaggaccatttaaaaaccactgatacgcataacgaaatgtcttaatgagagtatttttttttaaatatatagattgtgttccatgaaattcctttttctttgctctaagttgtgaccactttcaggcttccagagatgcctctcagttcttatggtactaaattttagtaataaatttcatatatatatatatctgctttgtgatttatgagttttcatcatcttctatctcagccttttttttccctccatacctagtgtttctgtatcctgtgttccactacaccatgatgctttttcctgtatcatacaccctagaatgcatattgtgcctagatacgtctattttgggaggagtagagaggagaatcttattcaaccccagaaccaaaataaaggaatagatgttgtttgaaaatgttgttattccctgcatagtttggggttacatagcccttaatcataagggagacttgagctgatcatatcgtgtttaggctaaaatttagcctaatttattttttctctcacataaatatgtatgtatatatatcatcttggtttgaatccttgataaagttaatttatgttaaaaataatttacttttaaagaactgacctgtagataagacagcttacgtgattactgtgtacagatttacattgccattatgtattattctttgtaaactttgtgcctttttttaatcagctattccctcgaaggtgtacatggttgtatgtaatgaacaattgcttgctatcaatatctggtaagtatattagtttttaaataccttacaattgttactatttattattagcttttatgtcatatctgtttttctttataggtaaagcttctcagctttattcccataatttaccagggctttttgattatgcaagacaaatgcaaaagttacctgttgctattccagcacacaaactccctgacagaatactgccaaggtaagggtacatccttagaggcaatatgatattaacagttcattctcataaatatttatgttacagaaagtgaaagagcactcagtttgggttaataaaaatcatgatgaaaaaataataagtaatatacattaacaagtgcttagtgatcacactcttgttctaaaatttttctactttgtactttcaaattatatcagacattttctctctgaattttttattctttttctgcaagtttaaaactagtttttttcttgtactttgccataattttacattgcatttagtgcctttgcttttgacatatgtgttaactttataaaatttttctcaaagtttctatacctagaaaatcaaaatgatttattgaaaagtgtttttgcaacctggcatggtggctcacgcctgtaatcccaatactttgagaggctgaggcaggaaaatggcttgaggctaggagttcaagaccagcctgagcaacatagcaagacctcatctctacaaaaaatattttttaaaaagtagccaggcatggtggctcgagcctgtggttccagctactcaggaggctgaagtgggaggatcagtggagccctggaggttgagactgcagtgagctatgatcatgccactacactccagcctggctaacaaggcaagaccgtgtctcagtgttttgcattagaagataattagtttgaagttgagtggttttgcctttctagtttcagtaatttgttattatgctctgttctttcgttatttaatataatattggacctctttattgactgaaagattttctagctctggtataaattgtattttacaaaaactttataatatgcctattcttttttataatatttgttgtaaagcaactaacataaaaccttaattttcgagtaccttgagaatctgctgttctcaatagagacctttttagcttatttgcttttagctgtgttcgtttcttccagattttactgaatacaccaaatgtgtatgaaatgtcccatgtataaatgagacaaaattgaataagatatagtctcttcctttaaggagtttccatatggtatgattttacctacgctgaatataggtacttattgtaccatattataattcatttttaataaagcataagctttggaattcaagtaaagttgaatttaaatcctggatcattgacttactagatatgggaccttggataaattatacaacctttccccatgtgttcagctctaagggtatttcacctccaggttattatttcaggaattttattatagtcaatctttagtttttttaatagtaacagccacaaatatgtccttcccactttcttcagtttcattatctagtaattactgtaaaatcttttaattctctcacttattggcaggaaacctaaaaacccttttagcatcataatattttatatatgtgcattcataccatttcttctgccatacagtgagcacaacttaaacctctactgagtgtcttattcttaatctgatgataaagagcctcatggttctcattctgaagataggtactcattgtaccatattgtaatccatttttagtaaagcataagctttggaattcaagtacagttgtatcatttacttactaggtatgggaccttgggtaaattatacagcctctccacgtatattcagctgtaactggaacctatatactcatctggcagagttgttttgaaaatgataaatcgtgtatgtaaagtacctaccacagcacctagtaagctctcaagaaatagaccttttgtcatcattattgggcatgataaattgaactctgccttgtagtgtactctaaaatatcctatgttaaatacattcagacagttaatttagaattccagttaattgggtgctggtaaaataagttgtattgtgtttcataaaatcatgactaaaattaaggcaagtctatagatcactatagaacattaactaaatttttgaaacatttcagtgtactgcccacaactcttattttgaaaagtttttgaaatccttaattcacagccatacttaatagttgatttctgtttgtgtagtagtcatccctatggtctttcagaacttggcagttaatcctcctgggttttgactagttcagtgttttaacccctaagttagctttgggagctaggacacaagttcacaagtgtggacaggaacattaaactttctgccagccgaaatctgtcaggagcttggttcagattttttttaactctaaaaagcgctttggttcaaagcagattcgttaagagtgtggggagtttttgttttgttttattttaagctgcattaaactccaatgtatatgaaaggggcatttttataattgtaagttataatgtaaaacttttcctaatgtaaagttagtcaagggtacaatgaggtgttttaaccagaaaatcgtaatcagaatattctagattgccattgtagtcgttcagtgtttcaacatctgaataaattctgtgtcattgtttagctgtcacagtgtgaaaaacgttttgattcacaaagacaagtacttaaaaagaggtaacagtttttgacagcttaccttgcacactctgaataatgttcatttaaattgatacagcctgtagttccagctacctgggaggctgaggcaggagaattgcctgaacccaagaggcagaggttgcggtgacccaagattgagccactgcactccatcctgggcaacagagtgagaccctgtctccaaaaaaaaaaaaaaaaaaaaagacctgagcaaaaatctaagcttcagatttctatgctgtaacctacctctttattggagggactgaatgacacagatgtctaaaatgcatggcacatagtaaggactcagtaaatgaagctaaaattatagcttttcataaataggtcaatatataaaatgtattaagggttaaaattacagtactacgatattatattttttaatattatatttatgcttatcattcagttgccaattgtgtggttacaagaacatccatcaggaaaattgttctgagcttgtttggaattgcactgaacatcacacatgtgctgtacaattttatataaaattgtacaactctaaaaaaaaaaaaagacttgtacagagcactggcatctatctaatctttggcaaatttacacatttaagtttaagtggctcatgcctgtaatcccagcacttaaggaggctgcacttttggcagattacttgagcctcaggaatttgagaccagcctgggcaacatggtgaaatctgtctctttcttctaaaaattatttttttaaaaaaaagagtttagatgtttgtagaagtcaggcacggtggatcaattgaggtcaggagttcgagaccaacctggccaacatgtcgaaaccccgtctctactaaaagtacaaaaattagttgggtgtggtggctgatgcctgtaatcacagctatttgagaagctgaggcaggagaatcacttgaacctgggaggcagaggttgcagtgaactgaggtcaagccactgcactccagcctgggcgacagagcgagactccgtctcaaaaaaaaaaaaaaaaaaaaaaatagaaaaaatctttagccgggcacagtggctcacacctgtaatcccagcactttgggagtccgaggcggacggatcacctgagctcaggagtccgagaccagcttgggcaaagtggcacaaccccgtctctactaaaaatacaaaaattagctgagcatgatggcaggcacctgtagtcccagctatttggcattctgagacaggaggattgcttgaacctgggaggcggaggttgcagtgagccaagatcacacccttgcactccagcctgggcgacagagcgagaccttgtccaaaaaataaaataaaatttaataataaaaagtatgtacagaaatgggtttaatttgaggtttttacaatttgatgcaccaacaacctttattatattacattttaaaagacatttgagtgtatgtgtagtttttaaattgtagtttttaaaaaaattcagaattgatttttatctattaaattcgagtcagatgtttgcaaaacacctatagcacctttgcagaacatctgtatcccacttttcctgagtagagaaacaaagatttctaaaaaagaaattcttcacaaatttttataataagacagctttttacagtacatgtaaatgtattacatgtactaaaaatagctctctccagtttttggcttttcattttctcaatgatatcttttggtaaaccaaagttactaattcagtaattgactgccacctgtagtttgaggtgctaaggttgaatcagtgggggcaaaaaagccaattaaaatgtaacagcattttcctgtatgatttgttgtttttgtatttcttaaatcccaaggtcatatatttctatagacttctatagtttgttttcatatttaaacccttaacccatttggaactgattgggggccatgagaaggggatccaatttatttaatttttttttttttttttttggagaccgagttttgctcttctgttgttgcccaggctggagtgcaatggtgtgctctcggctcaccacatcctccacctcctgggttcaagcgattctcctgcctcagcctcctgagtagctgggattacaggcatacaccaccatgcctggctaatttttttgtatttttagtagagacggggttttattatgttggccaggctggtctcgaagtcttgaccttgtgatccgcccacctcggcctcccaaagtgctgggattacaggcaacgtgccatggcacccggcctttttattctaattttaatagatgagctagtatgtcagcaccagttttgaactcatcctttgtgcactgatctataacagtagctttttcatatactaagtttgcctacatatattacgtactcacttttatttacatttaggaaattttctgtatcagcaaaaatccctgaaaccaaatggtgccagaagtgttg

SEQ ID NO: 875 - DNA, 1190 bp, Homo sapiens
cacattttagtgtacatttttagaatatatttaaaacaataagatagtctgaattggatggttgagtaacctttaaactcatctggtaaacctctaatgtatagtagaaataatttgaaagcttttaatgtataatagtacttacttcaggaaaataatttgatgtttcattgttggtctctttttctatattatttcagcctaagtctatcttcataccacaggaaatgcattctactgaggatgaaaatcaaggaacaatcaagagatgtcccatgtcagggagcccagcaaagccatcccaagttccacctagaccaccacctcccagattacccccacacaaacctgttgccttaggtaatggtggagggtgacagcaaatatgttaccaggttttcatactatggggagaaaaaaaactttcttttaagagattatttgaaattcttttggtggaggacagaaggaaagcagtggctatggagatgttttctgctttttgcctactagcttaaagtgtttttatgacaggattccctatgacacagtctgagatattttgtcctcatttctcatttcatatttagccttctctcttctagagactggttccccattcatttagctacggtgtggaaacaatgcaaattaaactatgaacaaacatggaaaatgtgttttgcgtctaggttacttctgttttagaagagagtaccttgtcctaactccttatttcatttaatcatttctaaaaaaataattggtattatttgctaggtatttgcctccaaattaatactagaaggtgctattttaacactgtaaagactcctctgtgtttatccagaagaagcaattttaaaaaagagcaactaggctgggcatggtggctcacacctgtaatcccagcactttgggaggccgaggcaggtggatcacctgaggtcaagagtttgagaccagcctgaccaacatggtgaaactccatctctactaaaaaaaaaaatacaaaattagctgggcgtggtagcgcatgcctgtaatcccagctacttgggagactaaggcaggagaatcgcttgcttgaacctgggaggcggagtttgcactgagccaagatcacgccattgcactctagcctgggtgataagagcaaaactccttctcaaaaaaaaaaaagagcaact

SEQ ID NO: 876 - DNA, 1451 bp, Homo sapiens
ttttatcacaccctgttttccaagggtcctgttacgtaccattcaccattctgcttagcaatggcttgtgagatggcatttattccttcagcatgtatttttatgttcaccttcctctcacctaaattcctcccccaccccaataacaattagttgttctatttgcatgtagccagagcaaaaaatgatttctttcccttaagttactattattataaaagggacgataaacacatgagtcattataccacaagtatagtgtggaaaggactctaaacataggctcactgaagaaggtggcatttgggccaggcctcaaaataaggcagattcagatttgaactgaatagatggagagtcatttcaaacagaagaaatgacataacatgtggaggcaaaaaaaaaatcataaaggttacataataaatgctgactattcgcttagctggatacagatgatagaaaggagagtggcagatgagtgtgagccattggccttgtgtgagcatgtacttattactgtgcaacaagtaaggaaggaagtcttgtgctagagcagtagcagtgcaaatagcagggaaggagtatctgggtgtgaagggaaaagatgtcagagatgactgaggcctcaaacccaaaagactggcagaagggcaagtgttaacaggaagcgagaacagctggtttagagcaaaagaggatgacaaggttgggtttagacatggtggttgagtctctgttagaactgcagcaaatttacttgactctacctgaggacaaaggggcaggtttttaggaaaagttaattataggaaagaatttcctatatagacttctctgttttctttggcgggacagttttgctgttctcctcctctgccatttaaatatttcaaatctatttgaagtgtgtgaactttactgctgttccccttttcacagttcagtttttttatctttattccaaatatatttacttcacatatatttactttacttcttctggtttataaccagaagaaaatttcaaaatctgaggtaattcaattttattatttgtaaaccagtattttaaggttcgattaatatctgtgatgttttctagtgaccataagaattgaatcaaaagggggaagatagacaagtgttttattttcagaaacaaaacattattgcctctgaacattaccaccaaaagcaccttgtgaaccacccgaatgtgttgtatcttaggagtctgacaacttcttcccaaatttactttgacccttttatcagaatgttgccacctcaggtaattttcctaccatcataagacgaaaagtccttcctcttaccccacagcctcattataaccagcagtttcatttgtgcatacaaataaaaatcctgcaagttaagagggcatttcctgctattacctgaaacagtatttttttcacccagccctc

SEQ ID NO: 877 - DNA, 293 bp, Homo sapiens
cttccatattattttaaacaacctcctcccagtttttctaatctgattactttgaagcaaatcttggtatagttacttttaaataggaagcagataggcacctttccagaatctatagaacttttccttagaatggcagggcatgagtttgtcagaagccccagatggggtcttcatttcaatcaggtgttatgcttggcaacggtttccctgtggggaactttgagggacttgggaagcattgttatctgtttttgtagctgcatctgcgttaaaaaaaaaaaaaaaaaaaa

SEQ ID NO: 878 - DNA, 503 bp, Homo sapiens
agtgtttcctgtggtaataagtttcttttttacggaagtgacattttctatctgagttaaataaaaggaatttcaccgtattaggttttattttggtttatttatttttttttactttttattatgaaaattatcaagcatatagaaaagtagaaacaatagtgtatcaactcccatatacctgtcatctagatctaacaattattatagttttccacatttgcttcatctattttcttatagtattttcagtatattagacattttaaatctaattttttaattttaatatttgtctctgcagtcatatctttataacacttaacgtaattagcaataattctctaatatgtgatattcatttcatattcagattttcccggatgttccgtaaaggtcttttacatgtggtttctctgaagcagagtacaagcaagagtacacattgcatttagttgttctctctcttaagtcttttttaatgtaaaactgcgtccaccttc

SEQ ID NO: 879 - DNA, 78 bp, Homo sapiens
aaaaagtcaagattttctgaccacaatgtactacaatttgaaattagttaacaaaaagataactccttaaaaaaaaaa

SEQ ID NO: 880 - DNA, 225 bp, Homo sapiens
gatctagaaagactaaaaacaatggaatggcaaaataattaccaggcaaatattaatttttaaaattgatggcacagaattttatagccacaacagaggccagaacacagtgtaattatgttgatatcagacaaaaaagacttaaaaagtatttagggataaagaaagtcactgcaaaatgaaaacatgaacaattcactaggaatattcaacagttctgatttt

SEQ ID NO: 881 - DNA, 379 bp, Homo sapiens
cattgaacacctgccgtttggtcaagcatttctaggcactggagattcaaagtattcacatattccttttctttataagactagcaagattctgaagattcatgtactcattcactcaacaaatatttgccaatcactactaaggttgccagacactattttagtgcttgggatgtatcagtaaacagaagagagagagaaaacaaatacccttccctgttggagctttcattctaatataaggagaaagatgataaatgtaagagaattatgtaatatgttagaaggcatatggggaaaaaaaaatacaccagggtaaggggtatgaggaaaactggaggaagggggtttgcaatttttttttaagagggaatcctgc

SEQ ID NO: 882 - DNA, 1516 bp, Homo sapiens
cattgaacacctgccgtttggtcaagcatttctaggcactggagattcaaagtattcacatattccttttctttataagactagcaagattctgaagattcatgtactcattcactcaacaaatatttgccaatcactactaaggttgccagacactattttagtgcttgggatgtatcagtaaacagaagagagagagaaaacaaatacccttccctgttggagctttcattctaatataaggagaaagatgataaatgtaagagaattatgtaatatgttagaaggcatatggggaaaaaaaaatacaccagggtaaggggtatgaggaaaactggaggaagggggtttgcaatttttttttaagagggaatcctgctctcccgcccaggctggagtgcagtggcgcgatctcagctcactgcaactcccgggttcaagtgattctcctgcctcagcctcctaagtagctgggattacaggcgcgcgctaccacacccggctaatttttgtatttttagtagagatggggtttcaccatgttggccaggctggtctcaaactcccgaactcaaaagtgatccgcgctcttcggcctcccaaagtgctggcattacaggcctgagccaccgcgcctggcctgcaattttaaatagagccgtcagcatgggcctcatttataaaatgactttaaatcggagacctgaaagagctgagggagtcagccatgcagttgtctggggaagagtgtcccaggcagaaggaacagctagctggtggaaaggcctggagacaaaagcctcgggaagtgttaaaaataatgagaaggccaggacggttggagccgtgagcaaatgggagcctaatgaggagataagatcagagagaggggtctcaagtagggagctgtaggaatcttggctgaaacagaaccactgctgggctttgaacagaggagtgataggatctgactcgtgctttcaaaagatcactctggccgccgtgctaagagcagaactaagaggacaatggtggaagccagaggctccattacccaggtacagaatgatggcttgaactagatagtagcaatgagtaagataaataagatgcagtctcagccgggcacagtggcgcttgactgtaatcccagttattaaggaggctgaggcaggaggataggatcacttgagcccaggagttcaagtgcagcccgggcaacacagcaagcccccatctctaaaaaataaataacgtacagtctgtctatggtctcccaacacttaggcagaggcggaagattgcgtgagcacaagagttcaagactagcctgggcaacataaggagactgtctctacaaaaataaaaaaattagccggcagggtggtgtgcatccttggtcccagctatgtgggaggctgagatgggaggattgggcccaagaggtcaaggctgcagtgagttgtgactgcgccactgcactccagcctgggtaacagagtgagaccctgtcttt

SEQ ID NO: 883 - DNA, 1516 bp, Homo sapiens; identical to SEQ ID NO: 882

SEQ ID NO: 884 - DNA, 673 bp, Homo sapiens
cgctgggacaagtagtgccctgagactcccgaggctctgcatcggcgcagccggtgtcatctagcggccggcagttccgagcgacttggggtccttgtgcctcggagtggcgtctgggagcaaaggcggcggaggcaaccccgcagttgaggacagtagggatcggtggctttggaccctgcccacggatacctggggccccatgccccgaaggaatggtgccttctgccctcccccgccccccaacatccgccacctcaccgaagcgcccggcaccttagcctcctctccaggaaagcggacgccttttccgacctggcacaccgcggattccgggacccccaacaaaggcgccttggaccttcaggacacccctcttttcagaacttcatgagtcccaggtgctagactcatgtctgcggaggcctttcccgtgcctggtctttctttctttcttaaaggagttggacctctaaaggcccttctaattctcaaggtagctacccaggttatggtactactatcagtaggtggagcgtttagaagggtagtttggtcgacgagtgaactttggaatttacttctacgtcagtcttcactgattctttctctaaactattagcactgataatctgccctataatttcacacttaattacattccagtgtagta

SEQ ID NO: 885 - DNA, 672 bp, Homo sapiens
cgctgggacaagtagtgccctgagactcccgaggctctgcaatgcgcagccggtgtcatctagcggccggcagttccgagcgacttggggtccttgtgcctcggagtggcgtctgggagcaaaggcggcggaggcaaccccgcagttgaggacagtagggatcggtggctttggaccctgcccacggatacctggggccccatgccccgaaggaatggtgccttctgccctcccccgccccccaacatccgccacctcaccgaagcgcccggcaccttagcctcctctccaggaaagcggacgccttttccgacctggcacaccgcggattccgggacccccaacaaaggcgccttggaccttcaggacacccctcttttcagaacttcatgagtcccaggtgctagactcatgtctgcggaggcctttcccgtgcctggtctttctttctttcttaaaggagttggacctctaaaggcccttctaattctcaaggtagctacccaggttatggtactactatcagtaggtggagcgtttagaagggtagtttggtcgacgagtgaactttggaatttacttctacgtcagtcttcactgattctttctctaaactattagcactgataatctgccctataatttcacacttaattacattccagtgtagta

SEQ ID NO: 886 - DNA, 673 bp, Homo sapiens; identical to SEQ ID NO: 884

SEQ ID NO: 887 - DNA, 11598 bp, Homo sapiens
tccaggagttgcttgctcagactctgaagatctgccttgctttccccagctggctctatttctagggagaatgtccaggcatttggatgactatcttgggggtcattcaagtgtccaggtctcctcctgggtgaagctgccaagactccatgctctggaccacactgtgatcaataagggctgcagacagcacgtactattttattgggcctcaaaagctttaaatacagaatgggctggccagagcgaagatgtgaacacactggcatttgagaatggacgtatcagaaaaatcacataatcaacagttggacagagagctgggacgagggcagtctgggatagaggcaggtgccagctggcggccagcctgggtgttaggattactccctccactaggacatagtctttgatgtttcttcctgatttgaggactttttttttttaaaaaaagcccacaaacctccaaataaaaccaactggcagagactgtggatagcagtgcccatcatcccagaggacaagggtctgccccagaaagccttggggtccccaccccgcagccccgatgccaccccacgagacatttccacacactgaagcaaagctggacccaatctacaacccctctctggggtttggagttgaaaacaccctcccggcagaggaagagggactggcgtgagcggggctgggggccaaacccgatcccctccttagcggctgtagccaaattcgtctgcatcatcagctcgaaagtctccatagcgccacaggttcagctgtaagaaaaaacagacaatagctcttcagggatacgggacccaccggaactcagagggccaaacccctcaactcggtaccctctgggggctcccaaggtaagaactcaccctggcgctcttggctgactcttgggcattcaggtattctgtgatctggagggacgagagaagaaagggagtggtcagagttgccctcaaatgatcagccagcaggaccctgcagaatgcttaggtaagcgccagagctctcccttgctcaagcctgtccaatggagccttagttccctcagagtaaaacggaaaacacaatcacattagtctcctggcttttcccttaactcttcgcactagctcttctgtctgcctggaacgctcctctggtcacgtcctcctggctacctctcccacctgcttcagtctgtggtaaagtatctccctcttaatgaggtctcgggcaaccccatttaaaattacaacctaggccaggtgtggtggctcatgcctataattgctgcactttgggaggccaaggcaggaggatcacttgagcccaggagttcaagaccaggctgaccccatctctattaaaaaaaaaaaaaaattagccaggcatggtggcccatgaatgtctgtagtctcagtacttggcaggctgaggtgggaggatcacttgggccagggagttgaaggctgcagtgagtcgtgattccggcactgtgccatggtactccagacccggtctcaaaagaaaccaaaccaaacaagagcaatacaaatacaaccttcccctcccattcctgactccctggattccacttctatttttcactgcagttatcatcttctaatatcctatttaatttacttattatgttcattgtaattgttgtctcctcatgcttgaatgtaagcttctcagggcaggggtgctgtttcttgctcactgatatactgtaggccctcaataaatgtctgctgatagaatgaataaataaatgagcatgttaggtgtttatctcagggactgcggcagaaggaattttctagatagcaggggcattatgggcagtttcatatggggtacaataagatctccaattctatagggaggctgaagctgacctcctaggagccatctcctaaggaaagtgggggtctatccagaggggcttaggggtcgggcttctcttgagacacagcggcagtccacaggggtgtcttgttccagtgagtcgtcagcctgcacagccaccgacacattatgtgggcttgcggtgtggtggggagagaggaaaggccaggagggctgggagaagggagagcagtgggcgaatggaagagagatgaagaggaggaaagtgtttggttttcatgccccgcctttcttgcccctgtctctgaaggaacatagggagaagctggccacatcctgctgccctctcatcactttctgccaggagacggcagctctgtcgggggcccgagcttccccaagtctggccctcttggatggttcgctgattcagcccagctgggacgcagggctggtctgcaatagggcctcagtggctgcttggtgaaagggtagagagggactcagaaatgtatagtgttgggtggaaggggctgccttgtatccagagcccaaagctaatcaccaaaggctgctcagtgcaagctgtttctcaggtacgagcgcactgattgtcacgatcagccctgagaagtggcaaggcagctagtcctcccctcacttcataagcagggagatggggctcaggaggctggcttctcctctcagaacagtggaggcaggactccaagtccaaggggctttccaaatagccagagggttgtgtggcagtctttctgggccctttggtgctgcctcctcgacagctctggctcggggtggcactgggtgttaggagttggttattgacttggaagctgtctgttggacagtgagactgggagagcgggagggacaggccttgaccctctccacatagcccctggcaaagctttctcgcctgtcacctgggggtacatggggagggaagctttccgctctagtttgcagctgcattctcagccaaacccgcagccaattaatttgggatgtaattagctttaaaacaaaaacaaaaaaacgccaacaaacccaaatccattatctttcctcagcaggaacagcaggatggtggattccctgctcccttcctggcttgtggaacagtccctttctctgtgagggtggtggcgcaatgctggggccgcctctccacatcacataccactttctggaactgtttctccttgcgcacctccaccatgaccagcccttccttcaccaagcccagccccacatcgcccttggaatctgcaaactgcagggtgacatgggggcagccggcactcaggtgttccacgttgagcaggcactgagtgttctggatatcccgaactacgctgtccacggcgtccgtgcgggcatcatcctggagcagagacacactcaggtcagagcaagccagagaacaaccacttgggccccagctcctgtccatagactcccaagaaagtctggccagcaggggcctgtaattttctccccagagaaccctagtgaggttggccaggcacggtggctcatgcctgtaatcccagcactttgggaggctgaggtgggtggaccccttgaggccaggagttggcgaccagcctggccaacacagtgaaaccccatctctaccaaaaacacaaaaattagctgggcatggggtgcatgcctgtaatcccagctacttgggaaactgcggcacgagaatcgcttgaagctaggaggcggaggctgcagtgagccaagattgcgccactgcactcctgcctgggtgacagagtgagacttggcctcaaaaaaataccaaaaaaacaaaaaaacacaaaccagaaagaaccctagtgaggcagaaacaggctctggataggaagccttccccttttcttttccttgccctcagccagagactatttgcaagtgacccctttctttcctaccctgtgctcccacccacctgccctgtgtctccgagaaaaagtgacttcttcccactcaaagctcacctacacttggtgccctttcacttccttcctccagcaggaccttgctccagtgcactatgtccatgacatcctgtgtctctgtcttttttttttttaaagagacagggactaggccaggtgtggtggctcatgcctgtaatcccagcactttgggaggccgaggtgggtgggtgacctgaggtcaggagttcaagaccagcctggccaacatggtgaaaccctgtctctactgaaaatacaaaaattagctgggcgtggtggcgggcacttataatcccagctactcggaaggctgaggtgggagaatcacttcaacctgggagggagaggttgcagtgagccgagattgtgccactgcactctagcctgggtgacaaagcaagaattcatctcaaaaaaaaaaaaaaaaaaaaaaagagagatagggactggccagagtgcagtggtgtcatcatctcactgcaaccttgaacttgtgggctcgagcgatcctctcaccgcagtctcctgaatagctgggactagctgggagtacaggcgtgtgccaccacacccagctattttttttttttttttttttttagagacagggtcttgctatgttgcccagggtggttttgaacacctgggctcaagcagtcctccctgcttggcctcctatgctgggattacaggcgtgagccactgcacctgactccacatgtctgtcttcaccgacgtgttttgtgatacttgccttcagcattttctgttgcatctctcctgaccttcagcaactttgtgaaaaggtaaagagtaaatttgcttattcttcatttgcaccctttatctggtgacagtgccaaccatggtgatcacgcagctctcactccaggtaccaggcaccttctcaaagctaaagccaagggcagcccctgggaagcctcaacctgcctgagctcccgggggatctggacattgtagactggctttctgtttctggggatagagggtatccacgaccctcagcatgggttctctcctttctggctgcatatgctgcctctgggctcctgttctcagatggcaggaccccagcacttcctaacactctctctcctccccatcacaccttccacatactcaatctgggcaatcttgtacaccgcatggttttaactacacagacccataaattccaggtctcatctcactccccaactgaaaactgtaaggctgcctggaggtcccactgcccaaattcgctccttctcattcttcttggccaacagcaacacatccacacataagaaacccagcaccacctttgtctctagcctggactgttacaattgtctcccacccattcattctagtccctctgttcactgtgccatcagaactaactttcagaaacacactggaccatgtcacacttctcctagaaatggtgccacattcctcctgcctatacagcacaaagaataaactccttgccagggtagacaaccccacgacaccaagccctttcccatctcacctcctgccactgcctgatcacctcctgccactgcccaaaagccccctgggatccagctgtggtggtctagtctttgtccaaatgcaccctggcctacctgcttctatgaactagctggaatgctctaatactacctcctcggtggcatcttcctcaacttcccatctcttgagtactattactaagagaccatcatagtttccatcttctcctgtcagcccatgagggctgctgcagcggctaagtgtcagtggatagtcccctttggaaggaggaagactccagactcacatcttggggcacctggatgaaggcgaaggcatactccgtggcttgagctggcagcacccgagtgctgaaggcaggtgatagggtacccaggcgggtggatggcaggacctctctctgcagaggaagcagcaggccaacatgtcacatactcgctgcccccttgctctctcacaggacagctctctgtggccaggcctctgggaatgctaactctgggccaccctgttcatcccatgacttggttccactttgcaatgtacaaaggctccccagtgggtgaagcctggagagaacgtgccctgctggtccagcagtagatggggagctcactctgggcctggtgctggcacacctagtggttcccatgaaaacaatcgcagtataactggactctaatcgcttttccatttcctcccaatgcccttctgtctgtgacatgggttccctgactacgttcccacaggccagggggttctccagctgctggctaggggagcacaccaagacaagtatccctgtggtcaccgggcctgcctgtggttctggcccaggcatctgggttcacccttgtctggcaggacctcttcctttgtgtattcccaggagatgggttgggagcatggcccaactctgggctctctactaacagatcctcagtcctagtacttgaggaaggcatgggaggtacgcagacaagcagtgccatgactcaggagcgtcaccctcctgaatgacagttttctcaccagctggctgctgttcctcaagagaatctcccaggagttgtcaacagactcccaggcccagccggagaaatttttctcccaagggtgccagtcagtcactgtcaccttgtgactgtcccttcccagcaaacctgagtttggggatgtgccggggattagcgcatggaacaaacacccagtttggcttgaacaccaggaactgtgggtgtaaaggccctccatgtgctacagaggccctgcccccattctgcagagacctcaggcagaagaggaactgtgggtgtggctggacactcatccgtggggtctggatgcgggacctatcagtgcttgcagccactggtcatagaccccagttttgccaggtcactgagggggcctggcctgttacacgcacagcagagatgccccaatgctcattgttctattggtaagctcagagggaccttggagagatcagatggatttgactcgggggctgctgtgtttgatagcccctccaacactctggtccccaacactcacgttgccgtagtcaatgtagaagacatgtattttggcaggagactcgactttctctactcgggcacggtacctgcaatggcatcatgggcagagctcaagagacagccctgaggactctgggctcccagagcctcagcaatggcggggcaggggcacagcatttccctgcctgggttcaacgggtgtcacaggggacagtaactgcactccatctaggcccagcctcggccactgtggtcaccacctaatggaatcagagcatagctgggagcagaagagggagaaaggagcatgtggagcagattaatgtgtccttggggcataaagcaacaagactaatgactagattgatgtctgctgtttaaacccagtgcactaaacagcagctgtaattagccagcagatctgcctgggaggccgcagcagggaacatatccaagtcacttcgtcaccctgggaaggccatgggccctcccttggtagattacacatcagcgaccttcttccggcctgtgagcactgctgctcatgtcctagacagccggggaagagggtcgggcagctggtttaggcttactgtagcccagcctctacctcagccccctgtaacatcattcttcctgggtggggtgaggggtgtgctggacagcctggccggccggccagccagccagccagcaagggctcccaccctggaatcccccaggagacaaggaaggagccacttctgtctggctggactgcaggggtgcacaggccagagcaaggccccagatgggctgtgggcaatgaagagggacacccaggagagctgctaggggccatcattaaccagctggggaaaccagactgctaaggcaacacctgaggcctgaggacagccctgctatcgttcctgctcaagactctgccttgcttttccaagtggcttaccattctccatctacaaatttggcaatgcagaactctcccctgcggggggcataggagccctctacaggggggtgactggcaatgtcattgcgcatgttctccatcagcttctccaactgggtgcctgccagggaggaagagcacagtgagacctgggtgctgggttcctcgacggctcagcagggtttttctgggagtggttggggagggagctcaatgtaaaattctggggggcactgcagcactggctctgtccccaacccatgcggggaagccctcttggtctccactccagaggtttcatgccatctgccttcagaagtgggactggtgacttgctgacatgttgggccttaaaggcacacacagccttgccatctcagctctccagtctgctggcccagggtgtgggagcccttgggatgtgcctgagctttgattaaggaggtggagaaagaaagtagacagggagcaaggacaatccaaacagcctcctccagggtgagagctggccagcccgtaccccattcctgcaaggccagctcctggcctgggccacagaggtggtaactgacagaagccactgtctactgtctttcagggggcaaaagtagggatgaaggatgggccccacaccaccgtggaaaaggccccagaattgaagccatggaaggtgggggaggaattcttggatcagggcctagagcctcagtattattcaaacttggcccctctgacccttgtcaccctgcaagatacatgctgaacaggacttccagtgctgctgggctggggctgtactgtcccaccctgctactcagggcccctgcgccacaggaggagggattccctgccttgtctttccctaagcactctgaccttgggtcagtggtcctgctgcttatttgctgcttttgcctgttttagcaacacccagggcctactcagtttctctccctggctccttgtagaattctcccaccctgactctgggaggcatcagtcccttctggccctgattctagctcagtctcagaccttttttgccccttgcgtctcagaagcaaggagggtgactgtggatctgtggtctaagtgtggggctcctctctttatcttcaggcccaaggcagtgctgtaaggagggcgcaacatatgtctgttgttacacttgccacagtcagccttataagttccctgctactatactgtgagctccttcagggcatagagcatagctcacttctttctgtttacttgcacaaagcctggtagaatccccaatgcatgcagggtgcttaataattcagctgcattgaaaataaactgcataagcatgcagggatgtatgtccactcttaagctgctgcagaggccactggtcctgcatccacacgacagaggcctgaaggtagcagccgcccctctccctacccagtggtcagccctctataattctctttagacagtgctccttgccatagacagtgaaattccagggattaagaagccttgacagacagcttcctccctaacttggtctactttcattttttttgctccaaggcaacagaagcaggactttgcctcctgccaacaggcaaagccctctgggaggtccttacagagcctcactggtcatttgcagctaatggcaatgttttcgtcagatccctcttgaagacagactctaattgaaagaagggagacagggtgagaggatgccacccaagaggggatgaaaggtttcagcagagagggggctgtggatcctgaggttcatctccatggataccatggagccaccagagggcaggggccttcctctctggagcccaccacaaatccccaggtggcctgccaggaagggcctcactcccttctcttccagcattctaaggacacatggttttctcttttctcttgttttctgcctcagatttctgctctctaagacttcaggggcttgttctgagtcaaggcgggtcctccccagcaggacccagaggctgagtagagcctgcctgggagtgatcgcatccttttgctcaagttctctggtgggctggcggggattttggggtggtggattccagctggttcctctgcccaggaacggctcttgttcccactgagaccaccactacaagactccttccctgtcacatgacccagccctagaggctggccaccgccccggttcattcaggcaactgctggagcagctttcagcaggactgtggctgacctcaagagaacctaatcccgcaggctcgtgggctccatctctacccctcccccttgcgtttttcctttttcaagcacagccagcccagggccaggaatggtcaagtttttcctggtgaaatgacactgccacaaaggcagctgcctgggaaacagcattagagggaagtggctgagacggggctggagcggacctggggtgggctgaggaggctgggcagagctgtgtcctgccatctgggggactgcccaagtgctgctgacacttctagccccctctgtccacctgtgcctaccatgatttgtttcctgggatccagaagcagctctaagagcttttccttccgctccaaactcaactgtttccctgcacagggtggccatgagaaaagggaggtcagggtggaaagcgtaagcggttggaggtgtagtcgggctagcggctgccagagctctctcctgccctttggcctccagaaaccccaggtctctgcccaggggaccctggccacagtgcacaccactcaggacggaaggaggagaaggtccttcagagactgcccggggatgtcttcccctagagcgctgcctgtttccatggaaactggctatcactcagggctatgttaacctctagagaaggagaaaccccagcagagacaaacccagcaccactccttgctcccccagagggaaacgggctgagcaatgcctggctggtgcctgacagattctgggggctacaaatcatcctgcccagcatagccaggggtatgtaggaacaaacaatcacctaagagactcagagctccacccagataaacctggttatctcacctgcgtccagaggacctgtccggcagcacctccatgcctgagcccaagccagggctcatgtgaaggctcctgaagtaactccaagcccagaggagcagtgggacaaggcagggagacaggggcggcaacgtgagctcttcaggggaggctcctggactgcctaggcattgttcctcccacccactgggcagaggccccctacccccaggcagcgccagctggaccaagccaggaaccacgagccagcggcctgagcactcaccggtctccacatcctgcacgtagaagtgcaggtcatcagtgatctcggtcacaaacacgggcttgtagctagcagatcgctccttctcctccagcactggcatcacctcctccacgggctgctcctcatagtgggcccagacctgcatgttcagtcggcagaggtgagaagagggcgaggaagtgaagtcataaaagacactgggaggccaggcgtggtggctcatgcctgtaatcccagcactttgggaggccgaggcgggtggatcacgaggttaggagttcaagaccagactggccaatatggtgaaactctatctctactaaa

SEQ ID NO: 888 - DNA, 11600 bp, Homo sapiens
tccaggagttgcttgctcagactctgaagatctgccttgctttccccagctggctctatttctagggagaatgtccaggcatttggatgactatcttgggggtcattcaagtgtccaggtctcctcctgggtgaagctgccaagactccatgctctggaccacactgtgatcaataagggctgcagacagcacgtactattttattgggcctcaaaagctttaaatacagaatgggctggccagagcgaagatgtgaacacactggcatttgagaatggacgtatcagaaaaatcacataatcaacagttggacagagagctgggacgagggcagtctgggatagaggcaggtgccagctggcggccagcctgggtgttaggattactccctccactaggacatagtctttgatgtttcttcctgatttgaggactttttttttttaaaaaaagcccacaaacctccaaataaaaccaactggcagagactgtggatagcagtgcccatcatcccagaggacaagggtctgccccagaaagccttggggtccccaccccgcagccccgatgccaccccacgagacatttccacacactgaagcaaagctggacccaatctacaacccctctctggggtttggagttgaaaacaccctcccggcagaggaagagggactggcgtgagcggggctgggggccaaacccgatcccctccttagcggctgtagccaaattcgtctgcatcatcagctcgaaagtctccatagcgccacaggttcagctgtaagaaaaaacagacaatagctcttcagggatacgggacccaccggaactcagagggccaaacccctcaactcggtaccctctgggggctcccaaggtaagaactcaccctggcgctcttggctgactcttgggcattcaggtattctgtgatctggagggacgagagaagaaagggagtggtcagagttgccctcaaatgatcagccagcaggaccctgcagaatgcttaggtaagcgccagagctctcccttgctcaagcctgtccaatggagccttagttccctcagagtaaaacggaaaacacaatcacattagtctcctggcttttcccttaactcttcgcactagctcttctgtctgcctggaacgctcctctggtcacgtcctcctggctacctctcccacctgcttcagtctgtgataaagtatctccctcttaatgaggtctcgggcaaccccatttaaaattacaacctaggccaggtgtggtggctcatgcctataattgctgcactttgggaggccaaggcaggaggatcacttgagcccaggagttcaagaccaggctgaccccatctctattaaaaaaaaaaaaaaattagccaggcatggtggcccatgaatgtctgtagtctcagtacttggcaggctgaggtgggaggatcacttgggccagggagttgaaggctgcagtgagtcgtgattccggcactgtgccattgtactccagacccggtctcaaaagaaaccaaaccaaacaagagcaatacaaatacaaccttcccctcccattcctgactccctggattccacttctatttttcactgcagttatcatcttctaatatcctatttaatttacttattatgttcattgtaattgttgtctcctcatgcttgaatgtaagcttctcagggcaggggtgctgtttcttgctcactgatatactgtaggccctcaataaatgtctgctgatagaatgaataaataaatgagcatgttaggtgtttatctcagggactgcggcagaaggaattttctagatagcaggggcattatgggcagtttcatatggggtacaataagatctccaattctatagggaggctgaagctgacctcctaggagccatctcctaaggaaagtgggggtctatccagaggggcttaggggtcgggcttctcttgagacacagcggcagtccacaggggtgtcttgttccagtgagtcgtcagcctgcacagccaccgacacattatgtgggcttgcggtgtggtggggagagaggaaaggccaggagggctgggagaagggagagcagtgggcgaatggaagagagatgaagaggaggaaagtgtttggttttcatgccccgcctttcttgcccctgtctctgaaggaacatagggagaagctggccacatcctgctgccctctcatcactttctgccaggagacggcagctctgtcgggggcccgagcttccccaagtctggccctcttggatggttcgctgattcagcccagctgggacgcagggctggtctgcaatagggcctcagtggctgcttggtgaaagggtagagagggactcagaaatgtatagtgttgggtggaaggggctgccttgtatccagagcccaaagctaatcaccaaaggctgctcagtgcaagctgtttctcaggtacgagcgcactgattgtcacgatcagccctgagaagtggcaaggcagctagtcctcccctcacttcataagcagggagatggggctcaggaggctggcttctcctctcagaacagtggaggcaggactccaagtccaaggggctttccaaatagccagagggttgtgtggcagtctttctgggccctttggtgctgcctcctcgacagctctggctcggggtggcactgggtgttaggagttggttattgacttggaagctgtctgttggacagtgagactgggagagcgggagggacaggccttgaccctctccacatagcccctggcaaagctttctcgcctgtcacctgggggtacatggggagggaagctttccgctctagtttgcagctgcattctcagccaaacccgcagccaattaatttgggatgtaattagctttaaaacaaaaacaaaaaaacaccaacaaacccaaatccattatctttcctcagcaggaacagcaggatggtggattccctgctcccttcctggcttgtggaacagtccctttctctgtgagggtggtggcgcaatgctggggccgcctctccacatcacataccactttctggaactgtttctccttgcgcacctccaccatgaccagcccttccttcaccaagcccagccccacatcgcccttggaatctgcaaactgcagggtgacatgggggcagccggcactcaggtgttccacgttgagcaggcactgagtgttctggatatcccgaactacgctgtccacggcgtccgtgcgggcatcatcctggagcagagacacactcaggtcagagcaagccagagaacaaccacttgggccccagctcctgtccatagactcccaagaaagtctggccagcaggggcctgtaattttctccccagagaaccctagtgaggttggccaggcacggtggctcatgcctgtaatcccagcactttgggaggctgaggtgggtggaccccttgaggccaggagttggcgaccagcctggccaacacagtgaaaccccatctctaccaaaaacacaaaaattagctgggcatggggtgcatgcctgtaatcccagctacttgggaaactgcggcacgagaatcgcttgaagctaggaggcggaggctgcagtgagccaatattgcgccactgcactcctgcctgggtgacagagtgagacttggcctcaaaaaaataccaaaaaaacaaaaaaacacaaaccagaaagaaccctagtgaggcagaaacaggctctggataggaagccttccccttttcttttccttgccctcagccagagactatttgcaagtgacccctttctttcctaccctgtgctcccacccacctgccctgtgtctccgagaaaaagtgacttcttcccactcaaagctcacctacacttggtgccctttcacttccttcctccagcaggaccttgctccagtgcactatgtccatgacatcctgtgtctctgtcttttttttttttaaagagacagggactaggccaggtgtggtggctcatgcctgtaatcccagcactttgggaggccgaggtgggtgggtgacctgaggtcaggagttcaagaccagcctggccaacatggtgaaaccctgtctctactgaaaatacaaaaattagctgggcgtggtggcgggcacttataatcccagctactcggaaggctgaggtgggagaatcacttcaacctgggagggagaggttgcagtgagccgagattgtgccactgcactctagcctgggtgacaaagcaagaattcatctcaaaaaaaaaaaaaaaaaaaaaaaagagagatagggactggccagagtgcagtggtgtcatcatctcactgcaaccttgaacttgtgggctcgagcgatcctctcaccgcagtctcctgaatagctgggactagctgggagtacaggcgtgtgccaccacacccagctatttttttttttttttttttttttagagacagggtcttgctatgttgcccagggtggttttgaacacctgggctcaagcagtcctccctgcttggcctcctatgctgggattacaggcgtgagccactgcacctgactccacatgtctgtcttcaccgacgtgttttgtgatacttgccttcagcattttctgttgcatctctcctgaccttcagcaactttgtgaaaaggtaaagagtaaatttgcttattcttcatttgcaccctttatctggtgacagtgccaaccatggtgatcacgcagctctcactccaggtaccaggcaccttctcaaagctaaagccaagggcagcccctgggaagcctcaacctgcctgagctcccgggggatctggacattgtagactggctttctgtttctggggatagagggtatccacgaccctcagcatgggttctctcctttctggctgcatatgctgcctctgggctcctgttctcagatggcaggaccccagcacttcctaacactctctctcctccccatcacaccttccacatactcaatctgggcaatcttgtacaccgcatggttttaactacacagacccataaattccaggtctcatctcactccccaactgaaaactgtaaggctgcctggaggtcccactgcccaaattcgctccttctcattcttcttggccaacagcaacacatccacacataagaaacccagcaccacctttgtctctagcctggactgttacaattgtctcccacccattcattctagtccctctgttcactgtgccatcagaactaactttcagaaacacactggaccatgtcacacttctcctagaaatggtgccacattcctcctgcctatacagcacaaagaataaactccttgccagggtagacaaccccacgacaccaagccctttcccacctcacctcctgccactgcctgatcacctcctgccactgcccaaaagccccctgggatccagctgtggtggtctagtctttgtccaaatgcaccctggcctacctgcttctatgaactagctggaatgctctaatactacctcctcggtggcatcttcctcaacttcccatctcttgagtactattactaagagaccatcatagtttccatcttctcctgtcagcccatgagggctgctgcagcggctaagtgtcagtggatagtcccctttggaaggaggaagactccagactcacatcttggggcacctggatgaaggcgaaggcatactccgtggcttgagctggcagcacccgagtgctgaaggcaggtgatagggtacccaggcgggtggatggcaggacctctctctgcagaggaagcagcaggccaacatgtcacatactcgctgcccccttgctctctcacaggacagctctctgtggccaggcctctgggaatgctaactctgggccaccctgttcatcccatgacttggttccactttgcaatgtacaaaggctccccagtgggtgaagcctggagagaacgtgccctgctggtccagcagtagatggggagctcactctgggcctggtgctggcacacctagtggttcccatgaaaacaatcgcagtataactggactctaatcgcttttccatttcctcccaatgcccttctgtctgtgacatgggttccctgactacgttcccacaggccagggggttctccagctgctggctaggggagcacaccaagacaagtatccctgtggtcaccgggcctgcctgtggttctggcccaggcatctgggttcacccttgtctggcaggacctcttcctttgtgtattcccaggagatgggttgggagcatggcccaactctgggctctctactaacagatcctcagtcctagtacttgaggaaggcatgggaggtacgcagacaagcagtgccatgactcaggagcgtcaccctcctgaatgacagttttctcaccagctggctgctgttcctcaagagaatctcccaggagttgtcaacagactcccaggcccagccggagaaatttttctcccaagggtgccagtcagtcactgtcaccttgtgactgtcccttcccagcaaacctgagtttggggatgtgccggggattagcgcatggaacaaacacccagtttggcttgaacaccaggaactgtgggtgtaaaggccctccatgtgctacagaggccctgcccccattctgcagagacctcaggcagaagaggaactgtgggtgtggctggacactcatccgtggggtctggatgcgggacctatcagtgcttgcagccactggtcatagaccccagttttgccaggtcactgagggggcctggcctgttacacgcacagcagagatgccccaatgctcattgttctattggtaagctcagagggaccttggagagatcagatggatttgactcgggggctgctgtgtttgatagcccctccaacactctggtccccaacactcacgttgccgtagtcaatgtagaagacatgtattttggcaggagactcgactttctctactcgggcacggtacctgcaatggcatcatgggcagagctcaagagacagccctgaggactctgggctcccagagcctcagcaatggcggggcaggggcacagcatttccctgcctgggttcaacgggtgtcacaggggacagtaactgcactccatctaggcccagcctcggccactgtggtcaccacctaatggaatcagagcatagctgggagcagaagagggagaaaggagcatgtggagcagattaatgtgtccttggggcataaagcaacaagactaatgactagattgatgtctgctgtttaaacccagtgcactaaacagcagctgtaattagccagcagatctgcctgggaggccgcagcagggaacatatccaagtcacttcgtcaccctgggaaggccatgggccctcccttggtagattacacatcagcgaccttcttccggcctgtgagcactgctgctcatgtcctagacagccggggaagagggtcgggcagctggtttaggcttactgtagcccagcctctacctcagccccctgtaacatcattcttcctgggtggggtgaggggtgtgctggacagcctggccggccggccagccagccagccagcaagggctcccaccctggaatcccccaggagacaaggaaggagccacttctgtctggctggactgcaggggtgcacaggccagagcaaggccccagatgggctgtgggcaatgaagagggacacccaggagagctgctaggggccatcattaaccagctggggaaaccagactgctaaggcaacacctgaggcctgaggacagccctgctatcgttcctgctcaagactctgccttgcttttccaagtggcttaccattctccatctacaaatttggcaatgcagaactctcccctgcggggggcataggagccctctacaggggggtgactggcaatgtcattgcgcatgttctccatcagcttctccaactgggtgcctgccagggaggaagagcacagtgagacctgggtgctgggttcctcgacggctcagcagggtttttctgggagtggttggggagggagctcaatgtaaaattctggggggcactgcagcactggctctgtccccaacccatgcggggaagccctcttggtctccactccagaggtttcatgccatctgccttcagaagtgggactggtgacttgctgacatgttgggccttaaaggcacacacagccttgccatctcagctctccagtctgctggcccagggtgtgggagcccttgggatgtgcctgagctttgattaaggaggtggagaaagaaagtagacagggagcaaggacaatccaaacagcctcctccagggtgagagctggccagcccgtaccccattcctgcaaggccagctcctggcctgggccacagaggtggtaactgacagaagccactgtctactgtctttcagggggcaaaagtagggatgaaggatgggccccacaccaccgtggaaaaggccccagaattgaagccatggaaggtgggggaggaattcttggatcagggcctagagcctcagtattattcaaacttggcccctctgacccttgtcaccctgcaagatacatgctgaacaggacttccagtgctgctgggctggggctgtactgtcccaccctgctactcagggcccctgcgccacaggaggagggattccctgccttgtctttccctaagcactctgaccttgggtcagtggtcctgctgcttatttgctgcttttgcctgttttagcaacacccagggcctactcagtttctctccctggctccttgtagaattctcccaccctgactctgggaggcatcagtcccttctggccctgattctagctcagtctcagaccttttttgccccttgcgtctcagaagcaaggagggtgactgtggatctgtggtctaagtgtggggctcctctctttatcttcaggcccaaggcagtgctgtaaggagggcgcaacatatgtctgttgttacacttgccacagtcagccttataagttccctgctactatactgtgagctccttcagggcatagagcatagctcacttctttctgtttacttgcacaaagcctggtagaatccccaatgcatgcagggtgcttaataattcagctgcattgaaaataaactgcataagcatgcagggatgtatgtccactcttaagctgctgcagaggccactggtcctgcatccacacgacagaggcctgaaggtagcagccgcccctctccctacccagtggtcagccctctataattctctttagacagtgctccttgccatagacagtgaaattccagggattaagaagccttgacagacagcttcctccctaacttggtctactttcattttttttgctccaaggcaacagaagcaggactttgtctcctgccaacaggcaaagccctctgggaggtccttacagagcctcactggtcatttgcagctaatggcaatgttttcgtcagatccctcttgaagacagactctaattgaaagaagggagacagggtgagaggatgccacccaagaggggatgaaaggtttcagcagagagggggctgtggatcctgaggttcatctccatggataccatggagccaccagagggcaggggccttcctctctggagcccaccacaaatccccaggtggcctgccaggaagggcctcactcccttctcttccagcattctaaggacacatggttttctcttttctcttgttttctgcctcagatttctgctctctaagacttcaggggcttgttctgagtcaaggcgggtcctccccagcaggacccagaggctgagtagagcctgcctgggagtgatcgcatccttttgctcaagttctctggtgggctggcggggattttggggtggtggattccagctggttcctctgcccaggaacggctcttgttcccactgagaccaccactacaagactccttccctgtcacatgacccagccctaaaggctggccaccgccccggttcattcaggcaactgctggagcagctttcagcaggactgtggctgacctcaagagaacctaatcccgcaggctcgtgggctccatctctacccctcccccttgcgtttttcctttttcaagcacagccagcccagggccaggaatggtcaagtttttcctggtgaaatgacactgccacaaaggcagctgcctgggaaacagcattagagggaagtggctgagacggggctggagcggacctggggtgggctgaggaggctgggcagagctgtgtcctgccatctgggggactgcccaagtgctgctgacacttctagccccctctgtccacctgtgcctaccatgatttgtttcctgggatccagaagcagctctaagagcttttccttccgctccaaactcaactgtttccctgcacagggtggccatgagaaaagggaggtcagggtggaaagcgtaagcggttggaggtgtagtcgggctagcggctgccagagctctctcctgccctttggcctccagaaaccccaggtctctgcccaggggaccctggccacagtgcacaccactcaggacggaaggaggagaaggtccttcagagactgcccggggatgtcttcccctagagcgctgcctgtttccatggaaactggctatcactcagggctatgttaacctctagagaaggagaaaccccagcagagacaaacccagcaccactccttgctcccccagagggaaacgggctgagcaatgcctggctggtgcctgacagattctgggggctacaaatcatcctgcccagcatagccaggggtatgtaggaacaaacaatcacctaagagactcagagctccacccagataaacctggttatctcacctgcgtccagaggacctgtccggcagcacctccatgcctgagcccaagccagggctcatgtgaaggctcctgaagtaactccaagcccagaggagcagtgggacaaggcagggagacaggggcggcaacgtgagctcttcaggggaggctcctggactgcctaggcattgttcctcccacccactgggcagaggccccctacccccaggcagcgccagctggaccaagccaggaaccacgagccagcggcctgagcactcaccggtctccacatcctgcacgtagaagtgcaggtcatcagtgatctcagtcacaaacacgggcttgtagctagcagatcgctccttctcctccagcactggcatcacctcctccacgggctgctcctcatagtgggcccagacctgcatgttcagtcggcagaggtgagaagagggcgaggaagtgaagtcataaaagacactgggaggccaggcgtggtggctcatgcctgtaatcccagcactttgggaggccgaggcgggtggatcacgaggttaggagttcaagaccagactggccaatatggtgaaactctatctctactaaa

SEQ ID NO: 889 - DNA, 419 bp, Homo sapiens
ctgtgaagaccgtgagatgatttcagaccctttcacaaaagagtgggctggcatcttgccctctgccgattgtgttcactgtgaatacacatcgcaccctaccagaagcaccttggaggtcaagaaataagtgagatgggcattctcttcttgatggataaaaataaaatcagagaccatggtgagagtgtgcttctctgctgggggcaggacagcttctccaggagtggggatgatgaagagattcacaccaagtcatcatccacacccctcctgacttcctgggccccctaaggggctgcatgtagtcaagggaagcacagtttactgggaccataaagggtctgattcagacagtgtaagcgcttgttctggctaagccggaggcgctgcaagtagaaactgtgagtccccacgag

SEQ ID NO: 890 - DNA, 418 bp, Homo sapiens
ctgtgaagaccgtgagatgatttcagaccctttcacaaaagagtgggctggcatcttgccctctgccgattgtgttcactgtgaatacacatcgcaccctaccagaagcaccttggaggtcaagaaataagtgagatgggcattctcttcttgatggataaaaataaaatcagagaccatggtgagagtgtgcttctctgctgggggcaggacagcttctccaggagtggggatgatgaagagattcacaccaagtcatcatccacacccctcctgacttcctgggccccctaaggggctgcatgtagtcaagggaagcacagtttactggaccataaagggtctgattcagacagtgtaagcgcttgttctggctaagccggaggcgctgcaagtagaaactgtgagtccccacgag

SEQ ID NO: 891 - DNA, 672 bp, Homo sapiens
gataaatcgacatactaacttttccccctgcaaaattaaaagcctgaggtacaagtctaagaagcttttagtgctctacataatataaattctggctggtgttaatgctatgaagataatatgtagttagaaaattgagtcggggaggaatgctcttcattttaagtggattttaaagtttctccttgagtggatgaagaacttgcctggtttgcaaaaatcttagttcaaaattatattttctaacaaaaactgcattttgagaagataagctaattttactcagtagtaagtcaaatgaggaagtgcagagggtttttttacatatatatagcaaccttgtcaagtggtcctcacaagagtcataaatactttgtaattagcacagtatattcagcagtgtataactctacaaatagtaccttatattagtgtagtattatatcaatatcttatgtataattcttatattaataccttatgcataattggattcacacattgaaggtctattttagtgttcttcaaaatgtgcttccctgacctactgaaatagaaacttggtgatgaagttcaagaatttgtattctaatcatctcaaacaattcctaaagacactgattttaaaatatctagtctaggccccattgtgtaatagttagcactctaaaa

SEQ ID NO: 892 - DNA, 1176 bp, Homo sapiens
gataaatcgacatactaacttttccccctgcaaaattaaaagcctgaggtacaagtctaagaagcttttagtgctctacataatataaattctggctggtgttaatgctatgaagataatatgtagttagaaaattgagtcggggaggaatgctcttcattttaagtggattttaaagtttctccttgagtggatgaagaacttgcctggtttgcaaaaatcttagttcaaaattatattttctaacaaaaactgcattttgagaagataagctaattttactcagtagtaagtcaaatgaggaagtgcagagggtttttttacatatatatagcaaccttgtcaagtggtcctcacaagagtcataaatactttgtaattagcacagtatattcagcagtgtataactctacaaatagtaccttatattagtgtagtattatatcaatatcttatgtataattcttatattaataccttatgcataattggattcaaacattgaaggtctattttagtgttcttcaaaatgtgcttccctgacctactgaaatagaaacttggtgatgaagttcaagaatttgtattctaatcatctcaaacaattcctaaagacactgattttaaaatatctagtctaggccccattgtgtaatagttagcactctaaaagatgaaaaagaaaatagtctatgtgccaaccacttcattagtacttatgaatttaaaaatgaaaaagtctggtacaggagacaagtatatatataaaattataatgcagtgtgataaatccattatagtatgtataagatacagaagagggactttaaacttgagaattcaatagagataataaatgggtaggagggaaatagaaaactttggtgccacaaaagcaaagtatgtatggtattgccaataatagctaccatctattgagtgctttactacctgtcaggtactgtattatataaactccattttaactgtacctcattttgcagatactcaggcacaaggaggtggttatttgtccaaactggaaccaagattcaaacccagacagagtcttaagcacatttttaatcactaactaacttgagatgcctaaatgccaaatactgttgggagttcaagtggttcttgattagcaaaatctatttttattagtgcaaa

SEQ ID NO: 893 - DNA, 3033 bp, Homo sapiens
gataaatcgacatactaacttttccccctgcaaaattaaaagcctgaggtacaagtctaagaagcttttagtgctctacataatataaattctggctggtgttaatgctatgaagataatatgtagttagaaaattgagtcggggaggaatgctcttcattttaagtggattttaaagtttctccttgagtggatgaagaacttgcctggtttgcaaaaatcttagttcaaaattatattttctaacaaaaactgcattttgagaagataagctaattttactcagtagtaagtcaaatgaggaagtgcagagggtttttttacatatatatagcaaccttgtcaagtggtcctcacaagagtcataaatactttgtaattagcacagtatattcagcagtgtataactctacaaatagtaccttatattagtgtagtattatatcaatatcttatgtataattcttatattaataccttatgcataattggattcaaacattgaaggtctattttagtgttcttcaaaatgtgcttccctgacctactgaaatagaaacttggtgatgaagttcaagaatttgtattctaatcatctcaaacaattcctaaagacactgattttaaaatatctagtctaggccccattgtgtaatagttagcactctaaaagatgaaaaagaaaatagtctatgtgccaaccacttcattagtacttatgaatttaaaaatgaaaaagtctggtacaggagacaagtatatatataaaattataatgcagtgtgataaatccattatagtatgtataagatacagaagagggactttaaacttgagaattcaatagagataataaatgggtaggagggaaatagaaaactttggtgccacaaaagcaaagtatgtatggtattgccaataatagctaccatctattgagtgctttactacctgtcaggtactgtattatataaactccattttaactgtacctcattttgcagatactcaggcacaaggaggtggttatttgtccaaactggaaccaagattcaaacccagacagagtcttaagcacatttttaatcactaactaacttgagatgcctaaatgccaaatactgttgggagttcaagtggttcttgattagcaaaatctatttttattagtgcaaaagaaacaccacagcttataaagtattatgaattcaataaatggagtcttaactaatgagatattattttctagaatggtgtagctgagagtatgtgtgattcaactgaaaggaataatgtttaatcagtgactcttactatatacaggaaaaggtgcagttctgtctttcaaatctgcctccttaccatattggcttacatccctcatgctgttttcttgtgtttgctagaaagttgttgccaagccaaatgtcatggccatgttgaaggcaaggaagaaaaaatggaaatggcctgtgccagctatatatatcgccttttatgagggaaagcaaagctttctcagaaatcccaaatggattttcccttgacttaattgcctgaccagttaaatggccactggtacctgcaaagaaagcagggtacatagctgtcccaaataaaatcagtattagcaagaagaaagaatattgagaaagcaattaacagtgtctgtgactgtgacatgtctgtgactttatattgtcaagtcctttccccttgaatatagttttggaagaattagctgaaggagtgtgttgacattgaatggccaagagaatgggctgtagcagacatctgtcatttctcttttggctgcccagtatcctaactcctgtgtttaaggaatccctcacctaatgaggcagagcatttcttcctcctaaagaatttgaaagtaccaggtaatgttttctcagcctccttttgcagctaaggaagaaacatctgccttcaattttaaaattagtgatacaaagaaggagggaaccatgcagattcctttgaagatggtgattaacaacactactgcattcatctccacagaggtacagcaaaagtgatttagttagcgataacctctaattctatttttttatttttattttttgagacagtcttgctctgtcaaccaggctggagtgcagtagcactgtcttaactcactgcaacctccacctcctgggttcaagcgattctcctgcctcagcctcccaagtcgctgggattacaagtgcccaccaccatgcacagctaatttttgtgtttttagtagatggggtttctccatgttggccaggctggtctcgaacttatgacttcaggtgatccgcccgccttggcctcccaaagtgctgggattataggcgtgagccactgtgcctggcctgtaacctctaattcttgtttgctggctgtcctagagatcctgagaattacttttaataaaatcatttttttgctgttattaaaactaacctgaattgcctaaaaccaagaactctgcttgataaaataagcatagttttaggaacagccatgcagatataaattttatcaacactttatacataatttgggacttatatttaaatgtaatatttgatgcttataaaagggtaaatggggaatgcaaataaattatcaagcataataactcatcacctaacttaagaataacattatgagtgcttgtattttatctatttgagctcttctcctatctttgccgacccccccgctctctttttaatagatttgttcgaatgtagaaagacctaaaatacatatgtatccctaaagtgacttattttatagttttctttctttttgaacttcaaaaaaattgtatcatactctatgtagtctaaggatttggtttttttcactcaacatgtctctagaattcacaagttttattgttttatagctgtcattttcattgatgtatatttcattgttgggttatacaacatattgttaaggaatacatacatatataataaattatacattttttaaaaaaatccttgctaa

SEQ ID NO: 894 - DNA, 6352 bp, Homo sapiens
gttacagttaatggttgctaaaaaagcggtggatgctgaaccagtcctgaaagctcaccagtctcactctgcagtaagaaactttgaataaattcgaaatgaaccaaattgaaatcttgagattgttttagattgtgtgcttgtttttttgctttgtgagatagggtctggctcttgtcgaccaggccgtggtgtaatggcacgatctcggctcactgcaacctctgcctcctgggctcaagccatcgtctcacctctgcctccggagcagctgggactacaggtgcacaccaccacgccctgttaatttttgtggggttgtttgtttgtttgtttgtttgtttgttttttggtagagatgacatttcgccatgttgcccaggctggtctgaaactcctgggctcaagcgatccacccacgttagccttccaaagtgctgggattataggcatgaaccactgcgcctggccatgtgtgcttgtttttgaagaaaagtaagctcattttcctttcatgtttatcacatttgttgtttattttgccatggctttgtaaagatatgaatagaaagaaggaggataggggctgctcagatccttttatttgagtgggactaaggttccccctccctcaccaagatctcttttgaaaatgttcattaattcttagcgctcccaccaaacataatgccagttagtgttgaagctgcctggtaaacacttggttggttattacttatacatttaacttaagctccttgcttgtaaggcgcatgaattcacattttattcctaacatagtacctgacatacagcaggcagtcagtaaaccttttataaactgaaccacatagtatcatactatgttgttaggggagagaagtatggttttttaaaaaaacaaacatggcatagtttctgttctttgctaatttgggagactcagtaattgttcttatgtttataggtgcttcatggttgtcattgtacattcttgtgtactgtatcatttaattctagatgtatagggttggagcctactacttctgtgagatgtagtgaaatataagcttcatcttaaattccattgaatgcattttactgacttaaaggttttaggaaacagatattttaaatatttgaatggctttcatctggaagagaaaaatagattttcttctcgtatgggaggaaaaaacttgaaccttgaaagagacagagtttactcagatagataaactttctaagtgatatgtccaaagatggaataaagcaccttggaatgtagtaagcttcctgccagtaaaagtattcaaatttaagttaaacagccacttagagatagtatccaacatccaatgggtagttaaactacaattgattttttttttccatttcaaatctttttattggagtgtggacctactgggggattgatgcactggacatagataattttcagaaatgaaaataacattgcttgcatcgaatcagatttcacccacaaaaatgactaaggccttaccagagttggcattggatgaaaccttagtcctttatggaaagggaatcatgtggccttctatttctgaaatagactaaagattactcatttattctctgcaattacagccatcagatcctttgaaatcttggaaggcatgagatgatgacatgagtgtaacacaaatccatattgaagagcccagtattttaaaattccccatgttcacataccaaagggttacttatgagctgatgcatatcacagataaccatatgattatcaacttgatgtctgggcaaagagcgaaaacagaaaatgcattctactcttcacttcttggttttaaatataagaaacattatatatattttaaaaaactgtattccttagtagtggtatcaatagaacatatacaactggaatgaggatccccttaaggaggccttttttttgtttgttttttaaataagttctagggtacatgtgcaaaacgtgcaggtttgttaacatatgtatacatgtgccatgatggtgtgctgcacccattaactcgtcctttacattaggtattcctcctaatgctatccgtccccactcccccaaccctatgacaggccccggtgtgtgatgttccccaccctgtgtccaagtgttctcattgttcaattcccacctatgagtgagaacatgcggtgtttggttttctgtctttgtgatagtttgctcagaatgatggtttccagcttcatccatgtccctacaaaggacatgaactcatccttttttatggctgcatagtattccatggtatatatgtgccacattttcttaatccagtctatcattgatggacatttgggttggttccaagtctttgctattgtgaatagtgccgcaataaacatgtgtgcatgtgtctttatagtagcatgatttacaatcctttgggtatatacccagtaatgggattgctgggtcaaatggtatttctagttctagatccttgaggaatcaccacactgtcttccacaattgattttttgaaagaaaaaaaaaaaaaaatatccgtgaatacaaggtcactttactatggcttcatgtctgaggactaaaattgtagggaaactccattgtaacttctgtatcatagattaaatgaacttttaaaaatcgtaatgcacatgcttttacgttctttatatctacagaacaggtgatttttccacctttgtttccttaatatcttcacaggaaattgagagtcagattgacagaatctgtgaaatgggagaagtgatgaggaaagcagttcaggtggatgatgaccagttttgtaagattcaggaaaaattagcccaattagaggtaagattgtagctaatttaggttcacagtatttcatagttttccgagtctggaagatatgccatcactatcccatcactgtaatatattgatgttttctgtgtgctcatgatttaaaattaaaactcctccttcatacccttttatacccttttgaagaaaggaaatatagtaaacagcaatcaatggaaataccaactatgtattggcaagaacttgaggtattatcatatgggaaggtagagggagtggaggggagaagttatatgtgagataaaatccttcatctgccataataagaagtgaagtagataatgtctaaaattgatgatcaggaaatagcagtataagcatattatttagaattacagaattaaataccaaaagaaatagataaaagtgttaaaagtggttgcatttggggtacaaagccaaagaactgcttgtataagccttgtagtcttgatttcttaaaagctatgtttatgtcatattttgattagaataggaatatgttacaaaaaaagttcggggtattagtgtgctcataaaattgttaaggaaaaacatttcaactttgagaggctgaggtaagtgaattgcttgagcccaagagttcaagagcagcttgggcaacatggcggaaccctgtctttacaaaaaatacagaaaattagccaggtgtggtggtgcacacctgtaatcccaggtactcagaggctgaggtgtgaggatcacctgaacctgggaagtcaaggctgcagtgagccacgatcatgcatgccactgcactccaaccgagtgacagagtgagaccctgtctcaaaaaaaaaaaaaaaaagcaaagcatttcagtgaatggtttgaatgctgcttattacaaggtgctgtcctggggcctttgagaaataccagagagaaaaaaacagatacctgcccagagtctagtggaagggataaccctagtattatatgatattaaataatatgtaaatgctaggagacagatacaaataccgaaggaagcacttcatgtggtagaagattcgtcgaccacaggctctaatctcttagttactctagctgggacttccgcacatcttggtgaagctaaaaatgctttggtttaccagagttttctgcagaggataaggatgaagagcagaagctaccctctctagaaatcaaaggtagtgacaggtcccaagtaggaattaggagctagtgaaatgatagcatgaccttctatttatccccgatttacctcacttacggaaacagccctaaggaaatgtggggcaaattctaccttaatacttcaagtagaaaatacacgaccaccagattcagaccccagcaataccacatccaagttgtctgaatttggacaacttttaggaattttgtgagccagagtatcctcatctgaaatatatggatgtaggcaatgatacctaccctacagattattgtgagataacatatacagggcacccaagtagtacccagctacatgctcaataagtaatttctttccccctttccttccatttctctagaactgtaagatatccaggagaggagattaatcagagtgaaacgattattaggaattttttaaataaaagaaataatagtaaaactgtgggaaccaagaagaatataacagtgaattccttaaatggagaggaccttgttttttgtttctcctttgtaatcctaacacttggtatatagaaattactcagtaaattactactacaaaagagtatcattgcctacattctacatgtaaatgtttgttaaatgaataaagtagtatttaaggaaattctcaactagtggattttttgtttccataaattttttaaaattaaaataatgttttctgctcctggctcaaaataatgtgttgttgtaatgcagttggacagtaaaaataccagaaataaacatgcctttttttttccagcttgaaaataaggaacttcgagaattattgtccatcagcagtgagtctcttcaagccagaaaggaaaactcaatggacactgcttcccaagccatcaaataactgaactctgaatgatggctggagattgtctatcaaggaaggaagttactgtcttcccattcaagtactgtccattaagtgtcttgcctcagatttgatttaatcttaattaaaggtatcaggtggcaatttagaattccagtcaatattggctgtccacagttctcagatgtgttaatgtgaatactacatgctgaatttcaccattcctttctcaaagagactacttttaattttcatttctgggaccttgatttatataaactatgttttcagttctttgttatttttcacatctctgaaactttgagcattttttataagccagcaatttattttacatagcattgtaaaatacacttctaggaaattttaggaaagatttaactgtttaaatctatttggcataaaccttgattttttttttccatttgacaaaaataatacaattccacagaactagatcagcagattctctgatttgtaatgtcattcacctgtgacattttaagtctctctggtgctaagaattggcactttatagcctggtgcctttacttttaatttgagagaacctactgctagtcccaggaaacacacttggaaataagtcagctattttttttgcccagtgatgctatagttgtcatattgtccaaagttcatattgttcaaagctgaggagcttgtcctgtgtatgtgaatgcacacatgtgcacttagttcaaatactgaaagtagcttttattaaatataatcagccaaaaacacacacaaaataaaaaaaacaaatataagtagtcagtttttcaatgttatcctactagttctacattctattttaatttttatacaatttccattttatagttaagaaccatcacttacttggattggatgtctttcattcctagcactaatagttggctttctttttttttgtttacatagaagcagggtttttttttatcttttttctttttttttgtttaagctatataaaaaggtgaggaagcagttttgttacctaatgaaaattattacactcataatgctgtgtaggcaacattgagattcaaatgcccagtggtcaactgggttcactcatcaactcattcccgtcccagtttactcacatttcaaatttataaatttcttcatgttatactattctatttagatttgcccagaattagttgaaataatgctaaacctgtcaatattttccagtaacattaagcaccatactgcatgggagagacacagtactaaaaagagttgttagtgctttatgtgagtgatatttctttcgtaatgctataaagaactacagttaaaataacaaaatattttaaagatgtcctaaaagcatctgatcccagtaataactaatggatgtcatctag

SEQ ID NO: 895 - DNA, 7763 bp, Homo sapiens
gctggggtggtgctgctgctatgagctgcaccatcgagaagatcctgacagacgccaagacgctgctggagaggctacgggagcacgatgcggccgccgagtcgctggtggatcagtcggcggcgctgcaccggcgggtagcagctatgcgggaggcggggacagcgcttccggaccaggtcaggcagagggtaggagtccagtgctctcggattctgggcactgaagggtggagagcgaggtaaagtgggaactcggcctggaatttattcccggtctcagagggcggcggtgagaccattttcctgggtcggggctgagaatcctgccctggagccctaacttctgcctcttcagttgcatctgccgctgttctctttaaggcatgcttagtctgtctctatttgtccagtatcaagaggatgcatccgatatgaaggacatgtccaaatacaaacctcacattctgctgtcccaagagaacacacagattagagacttgcaacaggaaaacagaggttagtcaggccttttcatatctggtaatagtttaaagttattgcaaaattgccctaaacatttacaaaagtgtacatatatttccaggtcagtacttttagtaggagagtcctcctgatctggcccagtaacaataaagtttgttagattacccttttcaaggtcatctgactaatattgcagcagcttaccaaagaggtgctgtgtagagttggtattattgcatggtttatttttaagcatcctcagatgtgtaacaaaagagttcatagcctcatggacttaaaatttaatgtttaagtattaatataaacactgaaggtaagatttaaggttttgtttatgttcttgtttgtgcaaggtgaagcagcagaattttattctaagggtatatattcttaggcttgattagtacattattaatgattgtggtattaatagttgtttaccagaggggtttcacatatatcattctactgtattctcatatcttcatttttatctaccacaatgcagttaagaaataggctcagaagaagctaaatgatttacttatgagtattaaccaagcaagttacagaactgaactcaaacacatgtcttctgatgatacatccattgttgtttctgcaagactttgcttctctgcctagaaagttacctttcacatagactttaactgttcagttttgcggacttaaacattgatttacaactttagattcatattatctatatagtgttacaaaattccaactgttaagactttggatttgggaactgtctctcagacatcactgccaagttcttttattttttgacagagctatggatttccttggaggaacaccaggatgctttggaacttatcatgagcaaatatcggaaacagatgttacagttaatggttgctaaaaaagcggtggatgctgaaccagtcctgaaagctcaccagtctcactctgcagtaagaaactttgaataaattcgaaatgaaccaaattgaaatcttgagattgttttagattgtgtgcttgtttttttgctttgtgagatagggtctggctcttgtcgaccaggccgtggtgtaatggcacgatctcggctcactgcaacctctgcctcctgggctcaagccatcgtctcacctctgcctccggagcagctgggactacaggtgcacaccaccacgccctgttaatttttgtggggttgtttgtttgtttgtttgtttgtttgttttttggtagagatgacatttcgccatgttgcccaggctggtctgaaactcctgggctcaagcgatccacccacgttagccttccaaagtgctgggattataggcatgaaccactgcgcctggccatgtgtgcttgtttttgaagaaaagtaagctcattttcctttcatgtttatcacatttgttgtttattttgccatggctttgtaaagatatgaatagaaagaaggaggataggggctgctcagatccttttatttgagtgggactaaggttccccctccctcaccaagatctcttttgaaaatgttcattaattcttagcgctcccaccaaacataatgccagttagtgttgaagctgcctggtaaacacttggttggttattacttatacatttaacttaagctccttgcttgtaaggcgcatgaattcacattttattcctaacatagtacctgacatacagcaggcagtcagtaaaccttttataaactgaaccacatagtatcatactatgttgttaggggagagaagtatggttttttaaaaaaacaaacatggcatagtttctgttctttgctaatttgggagactcagtaattgttcttatgtttataggtgcttcatggttgtcattgtacattcttgtgtactgtatcatttaattctagatgtatagggttggagcctactacttctgtgagatgtagtgaaatataagcttcatcttaaattccattgaatgcattttactgacttaaaagttttaggaaacagatattttaaatatttgaatggctttcatctggaagagaaaaatagattttcttctcgtatggaggaaaaaacttgaaccttgaaagagacagagtttactcagatagataaactttctaagtgatatgtccaaagatggaataaagcaccttggaatgtagtaagcttcctgccagtaaaagtattcaaatttaagttaaacagccacttagagatagtatccaacatccaatgggtagttaaactacaattgattttttttttccatttcaaatctttttattggagtgtggacctactgggggattgatgcactggacatagataattttcagaaatgaaaataacattgcttgcatcgaatcagatttcacccacaaaaatgactaaggccttaccagagttggcattggatgaaaccttagtcctttatggaaagggaatcatgtggccttctatttctgaaatagactaaagattactcatttattctctgcaattacagccatcagatcctttgaaatcttggaaggcatgagatgatgacatgagtgtaacacaaatccatattgaagagcccagtattttaaaattccccatgttcacataccaaagggttacttatgagctgatgcatatcacagataaccatatgattatcaacttgatgtctgggcaaagagcgaaaacagaaaatgcattctactcttcacttcttggttttaaatataagaaacattatatatattttaaaaaactgtattccttagtagtggtatcaatagaacatatacaactggaatgaggatccccttaaggaggccttttttttgtttgttttttaaataagttctagggtacatgtgcaaaacgtgcaggtttgttaacatatgtatacatgtgccatgatggtgtgctgcacccattaactcgtcctttacattaggtattcctcctaatgctatccgtccccactcccccaaccctatgacaggccccggtgtgtgatgttccccaccctgtgtccaagtgttctcattgttcaattcccacctatgagtgagaacatgcggtgtttggttttctgtctttgtgatagtttgctcagaatgatggtttccagcttcatccatgtccctacaaaggacatgaactcatccttttttatggctgcatagtattccatggtatatatgtgccacattttcttaatccagtctatcattgatggacatttgggttggttccaagtctttgctattgtgaatagtgccgcaataaacatgtgtgcatgtgtctttatagtagcatgatttacaatcctttgggtatatacccagtaatgggattgctgggtcaaatggtatttctagttctagatccttgaggaatcaccacactgtcttccacaattgattttttgaaagaaaaaaaaaaaaatatccgtgaatacaaggtcactttactatggcttcatgtctgaggactaaaattgtagggaaactccattgtaacttctgtatcatagattaaatgaacttttaaaaatcgtaatgcacatgcttttacgttctttatatctacagaacaggtgatttttccacctttgtttccttaatatcttcacaggaaattgagagtcagattgacagaatctgtgaaatgggagaagtgatgaggaaagcagttcaggtggatgatgaccagttttgtaagattcaggaaaaattagcccaattagaggtaagattgtagctaatttaggttcacagtatttcatagttttccgagtctggaagatatgccatcactatcccatcactgtaatatattgatgttttctgtgtgctcatgatttaaaattaaaactcctccttcatacccttttatacccttttgaagaaaggaaatatagtaaacagcaatcaatggaaataccaactatgtattggcaagaacttgaggtattatcatatgggaaggtagagggagtggaggggagaagttatatgtgagataaaatccttcatctgccataataagaagtgaagtagataatgtctaaaattgatgatcaggaaatagcagtataagcatattatttagaattacagaattaaataccaaaagaaatagataaaagtgttaaaagtggttgcatttggggtacaaagccaaagaactgcttgtataagccttgtagtcttgatttcttaaaagctatgtttatgtcatattttgattagaataggaatatgttacaaaaaaagttcggggtattagtgtgctcataaaattgttaaggaaaaacatttcaactttgagaggctgaggtaagtgaattgcttgagcccaagagttcaagagcagcttgggcaacatggcggaaccctgtctttacaaaaaatacagaaaattagccaggtgtggtggtgcacacctgtaatcccaggtactcagaggctgaggtgtgaggatcacctgaacctgggaagtcaaggctgcagtgagccacgatcatgcatgccactgcactccaaccgagtgacagagtgagaccctgtctcaaaaaaaaaaaaaaaaaagcaaagcatttcagtgaatggtttgaatgctgcttattacaaggtgctgtcctggggcctttgagaaataccagagagaaaaaaacagatacctgcccagagtctagtggaagggataaccctagtattatatgatattaaataatatgtaaatgctaggagacagatacaaataccgaaggaagcacttcatgtggtagaagattcgtcgaccacaggctctaatctcttagttactctagctgggacttccgcacatcttggtgaagctaaaaatgctttggtttaccagagttttctgcagaggataaggatgaagagcagaagctaccctctctagaaatcaaaggtagtgacaggtcccaagtaggaattaggagctagtgaaatgatagcatgaccttctatttatccccgatttacctcacttacggaaacagccctaaggaaatgtggggcaaattctaccttaatacttcaagtagaaaatacacgaccaccagattcagaccccagcaataccacatccaagttgtctgaatttggacaacttttaggaattttgtgagccagagtatcctcatctgaaatatatggatgtaggcaatgatacctaccctacagattattgtgagataacatatacagggcacccaagtagtacccagctacatgctcaataagtaatttctttccccctttccttccatttctctagaactgtaagatatccaggagaggagattaatcagagtgaaacgattattaggaattttttaaataaaagaaataatagtaaaactgtgggaaccaagaagaatataacagtgaattccttaaatggagaggaccttgttttttgtttctcctttgtaatcctaacacttggtatatagaaattactcagtaaattactactacaaaagagtatcattgcctacatcctacatgtaaatgtttgttaaatgaataaagtagtatttaaggaaattctcaactagtggattttttgtttccataaattttttaaaattaaaataatgttttctgctcctggctcaaaataatgtgttgttgtaatgcagttggacagtaaaaataccagaaataaacatgcctttttttttccagcttgaaaataaggaacttcgagaattattgtccatcagcagtgagtctcttcaagccagaaaggaaaactcaatggacactgcttcccaagccatcaaataactgaactctgaatgatggctggagattgtctatcaaggaaggaagttactgtcttcccattcaagtactgtccattaagtgtcttgcctcagatttgatttaatcttaattaaaggtatcaggtggcaatttagaattccagtcaatattggctgtccacagttctcagatgtgttaatgtgaatactacatgctgaatttcaccattcctttctcaaagagactacttttaattttcatttctgggaccttgatttatataaactatgttttcagttctttgttatttttcacatctctgaaactttgagcattttttataagccagcaatttattttacatagcattgtaaaatacacttctaggaaattttaggaaagatttaactgtttaaatctatttggcataaaccttgattttttttttccatttgacaaaaataatacaattccacagaactagatcagcagattctctgatttgtaatgtcattcacctgtgacattttaagtctctctggtgctaagaattggcactttatagcctggtgcctttacttttaatttgagagaacctactgctagtcccaggaaacacacttggaaataagtcagctattttttttgcccagtgatgctatagttgtcatattgtccaaagttcatattgttcaaagctgaggagcttgtcctgtgtatgtgaatgcacacatgtgcacttagttcaaatactaaaagtagcttttattaaatataatcagccaaaaacacacacaaaataaaaaaaacaaatataagtagtcagtttttcaatgttatcctactagttctacattctattttaatttttatacaatttccattttatagttaagaaccatcacttacttggattggatgtctttcattcctagcactaatagttggctttctttttttttgtttacatagaagcagggtttttttttatcttttttctttttttttgtttaagctatataaaaaggtgaggaagcagttttgttacctaatgaaaattattacactcataatgctgtgtaggcaacattgagattcaaatgcccagtggtcaactgggttcactcatcaactcattcccgtcccagtttactcacatttcaaatttataaatttcttcatgttatactattctatttagatttgcccagaattagttgaaataatgctaaacctgtcaatattttccagtaacattaagcaccatactgcatgggagagacacagtactaaaaagagttgttagtgctttatgtgagtgatatttctttcgtaatgctataaagaactacagttaaaataacaaaatattttaaagatgtcctaaaagcatctgatcccagtaataactaatggatgtcatctag

SEQ ID NO: 896 - DNA, 555 bp, Homo sapiens
tatttctcacatatgactagttatcaatataagtttttagaagtattatcaggttagcaataaaagcaatggtatgtaatcatcagcctagaaaatattgtcaattgtaaattataaaatgtacaaacgtaggactgactgaaaatactgcaaaaaaaatcaatgtttttatcagtggagcagtaagtaattgatatatggcaaatgatataaaatctgttgtgctttcaataaaaccataatgatgtaattatattatgcactagacatagccaaagtttctcttatttttaattattgtgatagaaatttactcttgtgtaaattgctgtatacctgtgtcactgatgaggaaattctaattatcttgaatagttttaaaaatgggaatgtttctgggagaaaggaattccccaaaagagaaaaaataaattgctcttttggcagttggattagtggtgaaagagtgttataacccaaaaaattcataaaggtaccagctattgtcagcatttggtagtaaagagaatgtcttataaacctattgatatgatg

SEQ ID NO: 897 - DNA, 555 bp, Homo sapiens
tatttctcacatatgactagttatcaatataagtttttagaagtattatcaggttagcaataaaagcaatggtatgtaatcatcagcctagaaaatattgtcaattgtaaattataaaatgtacaaacgtaggactgactgaaaatactgcaaaaaaaatcaatgtttttatcagtggagcagtaagtaattgatatatggcaaatgatataaaatctgttgtgctttcaataaaaccataatgatgtaattatattatgcactagacatagccaaagtttctcttatttttaattattgtgatagaaatttactcttgtgtaaattgctgtatacctgtgtcactgatgaggaaattctaattatcttgaatagttttaaaaatgggaatgtttctgggagaaaggaattccccaaaagagaaaaaataaattgctcttttggcagttggattagtggtgaaagagtgttataacccaaaaaattaataaaggtaccagctattgtcagcatttggtagtaaagagaatgtcttataaacctattgatatgatg

SEQ ID NO: 898 - DNA, 826 bp, Homo sapiens
gagaattagacatttaataaaaatgccaggtgttccttgtcctcattcttccatatttgtcttatatatgtttagcaaaataattgagttaaatatgagcttttatgcttaagcgatggctgtgttttcgctcttaataaaattgcaccataaaatttgatttttagtgccaaaattataaaaaggggttgggcttgtttcctcaacctgaacaacttcttaccttcaagatggatgattcaaagaggaataatagggaatttcttagtatgaagttacttggttgttttcttaggaaaacaaaaggtagaatttaacagcatggggcctgatttaaatagaaaataaatgtacagatataatcaactctgctgtcatggggatttcaagttataaatgcaataagtaacatcccctgacttattctatgtacttttgccctaatctactacctattagtctgaaacttgagtttttaaatttaatctctatgtaaaagaggaataaattgaatgcataattaaaatatatgttgtcaattatcacacctttttgcctagactataagcttcatttttcctgttatatccactaaattaatttatgcttgtttttccattaaaacaagttactttggctgggtgcagtgactcccgcctgtaatcctagcactttgggaggctgaggtgggcagatcatgaggtcaggagttcgagaccagcctgtccaacatggtgaaaacctgtctctactaaaaatacaaaaattagccgggcatggtggccggcacctgtagtcccagttgcttgggaggctgaggcaggag

SEQ ID NO: 899 - DNA, 2392 bp, Homo sapiens
cacaattttgagcccttttccttcaaaggaattaacaaataggtaattgtcttttttagtactcattattcaggtttattggtcttatggttttataaattgagagtattctctccacttgagaaatgattttgtaaagtctgtttttaatttcattaggttacacttgagacttctttgtgaagagcttaacatttagctgttaaaacttgaggaggtggccgggcgcggtggctcacgccttgtaatcccagcactttgggaggccgaggtgggcggatcacgaggtcaggaggtcgagaccatcctggctagcacggtgaaaccacgtctctactgaaaataaaaaaattagccgggcgtggtagcgggcgcctgtagtcccagctactcgggaggctgaggcaggagaatggcatgaacccgggaggcggagcttgcagtgagccgagatcacgccactgcactccagcctgggagacagagcgagactccgtctcaaaaaaaaaaaaaaaacaacttgaggaggtgggagaaacatgaaggcaatcccttttccttccctttcttttgttggtttttttttttttcatttattcagtacatatttattgagtatctaccatgttcctagtacttttctaggagccaaagatatagcagtgaacaaaacagataaacaagtaagtacataaattaaacgatttctgacatggattcaaagtcagaggttttgggtgggggccaggaccatgcatctttagcaagctctccctgagtaggatggcagcagatgatctgtggtccatgcatagtgtaaagaacccgctccgaagagccagggagcagtgtccagctgcaagtcctccttttttctgtcagggaagtttgcagaagtgaatcagtggatagcaacaccaaagtgataccttcagggtagacaggaaggtagtctgtttagttgaaggtcaggagtagtcaccttaattattcaagacatcatttctcgccctggattgccccatcgcctcccaagctaaacctcagatatttcctgcaaatatcaaaaagaggatttttctcctttttccttccttttatatatatacatgcatacctcttttttagaataagaaacatttttccccaattcatttaacttttgagacacttagaagttctgaaagaataattttaacaagttaactgaaattaatattatgcctctagaaaaactcacaagatcaagggcatataaaatgcgcaggatacttatttccataaaagtattcgagaccttaaaatcagttaccaaaaaatgtcatttccatccattccttgagctaattctgcatctctaaagaaaaactcaagcgcaagactttctattcttgatgttgagggcatgtctctgtttaaatgaaactagtgcttcagatgcttttattacattatctcacagtgactcaaataatgtgtatatgttggggatggccttatgatcatagacgatcagccattgaactcaataaggtgagaatttttaagtgggggatcaattaaatgttgaaaactgttaataataagccagtttgcaaagtagtagtcaaatgccacaggtcactttctttttctaattttctcccggttacatttttgtctctggaaaattagaatggaaatatctgcagatccctaaagaatcctatatagtacaggcttggattccttaattagtgccttggaagccagctcagcccttcttcaacttaactctttaaaaaaagaagtctttttaattcgtactacactcagaatggagggcagtccacttttcaacaagaaataggtatcattgaattctaacagatacataagcacagataatatcacattcttcatttcatctcctttataaatttctaagctagcagtctttcttggatactctccagcatcttttaaacataggccatttatcatattccatagttggaatgctttctgtgtctgttctaggtagattccccttaatcttagattctaaaaggggatgtttccaattaaacaatacccagaataataggtacatagtgactggcaatagtcagtgatgctgtgtgtgattgtgtgttccccttctatcatttttttaatgtttgtttaatgccatttattttttaagatgggatatatattttaattagctgggcgtcgtggcgggtgcctgtagtcccagctactcaggaggctgaggcaggggaatgccgtgaacccggagggcagagcttgcagtgaaccgagatcacaccactgcactccagcctgggcgaccgagtgagactccttctccaaaaaaaaaaaaaaaaaaaaaaaaaaaaaaaaaaaaaag

SEQ ID NO: 900 - DNA, 826 bp, Homo sapiens; identical to SEQ ID NO: 898

SEQ ID NO: 901 - DNA, 2400 bp, Homo sapiens
cacaattttgagcccttttccttcaaaggaattaacaaataggtaattgtcttttttagtactcattattcaggtttattggtcttatggttttataaattgagagtattctctccacttgagaaatgattttgtaaagtctgtttttaatttcattaggttacacttgagacttctttgtgaagagcttaacatttagctgttaaaacttgaggaggtggccgggcgcggtggctcacgccttgtaatcccagcactttgggaggccgaggtgggcggatcacgaggtcaggaggtcgagaccatcctggctagcacggtgaaaccacgtctctactgaaaataaaaaaattagccgggcgtggtagcgggcgcctgtagtcccagctactcgggaggctgaggcaggagaatggcatgaacccgggaggcggagcttgcagtgagccgagatcacgccactgcactccagcctgggagacagagcgagactccgtttcaaaaaaaaaaaaaaaacaacttgaggaggtgggagaaacatgaaggcaatcccttttccttccctttcttttgttggtttttttttttttttcatttattcagtacatatttattgagtatctaccatgttcctagtacttttctaggagccaaagatatagcagtgaacaaaacagataaacaagtaagtacataaattaaacgatttctgacatggattcaaagtcagaggttttgggtgggggccaggaccatgcatctttagcaagctctccctgagtaggatggcagcagatgatctgtggtccatgcatagtgtaaagaaaccgctccgaagagccagggagcagtgtccagctgcaagtcctcctttcttctgtcagggaagtttgcagaagtgaatcagtggatagcaacaccaaagtgataccttcagggtagacaggaaggtagtctgtttagttgaaggtcaggagtagtcaccttaattattcaagacatcatttctcgccctggattgccccatcgcctcccaagctaaacctcagatatttcctgcaaatatcaaaaagaggatttttctcctttttccttccttttatatatatacatgcatacctcttttttagaataagaaacatttttccccaattcatttaacttttgagacacttagaaattctgaaagaataattttaacaagttaactgaaattaatattatgcctctagaaaaactcacaagatcaagggcatataaaatgcgcaggatacttatttccataaaagtattcgagaccttaaaatcagttaccaaaaaatgtcatttccatccattccttgagctaattctgcatctctaaagaaaaactcaagcgcaagactttctattcttgatgttgagggcatgtctctgtttaaatgaaactagtgcttcagatgcttttattacattatctcacagtgactcaaataatgtgtatatgttggggatggccttatgatcatagacgatcagccattgaactcaataaggtgagaatttttaagtgggggatcaattaaatgttgaaaactgttaataataagccagtttgcaaagtagtagtcaaatgccacaggtcactttctttttctaattttctcccggttacatttttgtctctggaaaattagaatggaaatatctgcagatccctaaagaatcctatatagtacaggcttggattccttaattagtgccttggaagccagctcagcccttcttcaacttaactctttaaaaaaagaagtctttttaattcgtactacactcagaatggagggcagtccacttttcaacaagaaataggtatcattgaattctaacagatacataagcacagataatatcacattcttcatttcatctcctttataaatttctaagctagcagtctttcttggatactctccagcatcttttaaacataggccatttatcatatttcatagttggaatgctttctgttgtctgttctaggtagattccccttaatcttagattctaaaatggtgatgtttccaattaaacaatacccagaataataggtacatagtgactggcaatagtcagtgatgctgtgtgtgattgtgtgttccccttctatcatttttttaatgtttgtttaatgccatttattttttaagatgggatatatattttaattagctgggcgtcgtggcgggtgcctgtagtcccagctactcaggaggctgaggcaggggaatgccgtgaacccggagggcagagcttgcagtgaaccgagatcacaccactgcactccagcctgggcgaccgagtgagactccatctcaaaaaaaaaaaaaaaaaaaaaaaaaaaaaaaaaaaagatgggat

SEQ ID NO: 902 - DNA, 996 bp, Homo sapiens
cccttcagcctggctggctctccagccatctcggaaagcttctctttcctaaaccctccatactcgcaggttcagctacagaggtaactgcaggctcaggttctccagggtggccagcccaccagcccaccgtcccggtgcagcagtgcctctccagcgacagctccaccgcgagcctggcgggctcccgaccttgctccccagcacgtcgtctccaagccacggtctcaccaccctccatcagcctcgggcgacaccaaggggaacagagcgctggagctcctcgaagtcctcccgaccttagcggggctccgttcatcctcccggacgtggccaggccccgctctggccccgcgcccgcccctcccgcggggctgcccctgtctctctgccggagacccggactcagtgagtgagcgcagcgcggccatagggcttcctgcagcggggtctcagcacgtcttctggctggactctggggtctcctggcctggctgtgtctcctggttctcagcgctcgcctcccacgcggggcgggagtatgggagtgggctgctcccgcgaagaatcctggggaagttgaggcactggctcccgctgttcagaacactgcccgacgtccccagagctagccactcctccttcccacccacccgcagcactctcgaggtcgcaacggcagtcaccaggtcccggggcctgcgttcagctgcttgatccgactaggtttggcttcggacccgaatgggtcagctccacgcccgatggagtttttcaagctggtgcctgcacgtgcccccgccgcggggcatgaagccgcgtggcgcccaaactgcctcacaaccaccgctgacccgaagcctctctcactccgtccactgttagaaacctgaagctgccctctgtgagaaagcgttgggattgaatccagacttttggggaaccttaacaataaagaatacaaaatattgactaaaaattggatttgaaagtgac

SEQ ID NO: 903 - DNA, 112 bp, Homo sapiens
cctgtaatcccaacactttgggaggtcgaggcaggtggatcacctgaggtcatgactttgagaccagcttggccaacatggtgaaaccccgtctccactaaaaatacaaaaa

SEQ ID NO: 904 - DNA, 354 bp, Homo sapiens
agagaacccaggtggacattctttccagccaaagactcaatacttctggaaagattaaggtcacatttgtttcaagagtgtccagtacaacaaagaccttccacagggagtagtaactattcctgatagggaacctccaaactgcaataggctttacccttttttatctttcctctttcttcgtgcctcaagtcagatcatagcaagaagaaaccttggaaaatcccctcttctcctccacacctcccagagatgcccaaaaagcagtttaatgctttttcgtagacttagaaaacagttctgttcttccctgggctcagagaagcctcccattttggagctcttatcttcaaa

SEQ ID NO: 905 - DNA, 151 bp, Homo sapiens
ggcgtgatggcaggcacctgcagtcccagctactcaggaggctgaggcaggagaatggcatgaacccgggaggtggagcttgcagtgagctgagattgcgccactgcactccagcctgggcgacagagcgaggctccatctccaaaaaaaa

SEQ ID NO: 906 - DNA, 1374 bp, Homo sapiens
tcagccacggatagagtgattgcaacatacaggatcagctcaggcatcacagcgccgcctgccagggctgtggcggtatccggccggttgctccacctggcgttcgagaggagaaactacagggagcgccgactgcagaaatgaggccaactccgcggagtaagccgatccgtaacgtggactgcggtttggtctgtaccgcgtttgggatctcggacttgcgtcccctttccgagcatgcgcagtcgtcacactgccaaaacaaaactcctactcagaattcagtgttaacatacggtcgggattggggttcagtgcctaaaatgcagcaggaggaagatcttgggagtcctgctttctgtcgcgccgggactctggcatcactggatggcaaaccggctccatgggcgaatagtcagcaaaatgccgcagctgcttctggtggcttcgccctttcccccactccccgtttcctcctttccattccggtgataaaccatgagagaagcagcatcagcgagccagaagatagggttaaatatgatccgaatccctctttcctggctcctgggacagtctaggaataacgggcacctgcgacccgctgtaaggttgcgaggtcactccaggcttgcccgagcctctgctcaggtttcaactacgcgagttgggataagcagcgccctcccctcccgcccccatgctctcctgaacgtgggttttctctcccctttcgctcgcccttcccctgatggaaggaggtgggggaggcttcctggccctcatctttcctaggcctccttgtctcccagacaggacctgccctgccctttggaacagggcgacaaggcctatccagttccaaacccctgccgtccctgcatcgtgcttgaacgcagcacgagaaagacgggaaaagctcaccaaaccccataaaaaataaaaaataaaaagaaagccgcggctgtaaataaaggcaaatccgccactctctgaggggccgtttgtcctcccctccttggccccgtccttcccgccgccccctcccggctcccgggccccgcggcgccccggccccgagctcctccatttaatcggatttgggagaaggggaggataaatcacggcagcagctttacggtcccggaggagaggcgagccgcagacaggcacaccccggccggcgataaaaaccgccgctgaaagcccacggagcaatttcccgggaccccgagcgacgccattacaggaatgtaattttgcccggatgaggcccgagtttaattatcctcgcggaggaatttcaatgcggccaatccatcttgcaggcgggcggcagagggatttatatgggcccgttatttcacaccgatc

SEQ ID NO: 907 - DNA, 1375 bp, Homo sapiens
tcagccacggatagagtgattgcaacatacaggatcagctcaggcatcacagcgccgcctgccagggctgtggcggtatccggccggttgctccacctggcgttcgagaggagaaactacagggagcgccgactgcagaaatgaggccaactccgcggagtaagccgatccgtaacgtggactgcggtttggtctgtaccgcgtttgggatctcggacttgcgtcccctttccgagcatgcgcagtcgtcacactgccaaaacaaaactcctactcagaattcagtgttaacatacggtcgggattggggttcagtgcctaaaatgcagcaggaggaagatcttgggagtcctgctttctgtcgcgccgggactctggcatcactggatggcaaaccggctccatgggcgaatagtcagcaaaatgccgcagctgcttctggtggcttcgccctttcccccactccccgtttcctcctttccattccggtgataaaccatgagagaagcagcatcagcgagccagaagatagggttaaatatgatccgaatccctctttcctggctcctgggacagtctaggaataacgggcacctgcgacccgctgtaaggttgcgaggtcactccaggcttgcccgagcctctgctcaggtttcaactacgcgagttgggataagcagcgccctcccctcccgcccccatgctctcctgaacgtgggttttctctcccctttcgctcgcccttcccctgatggaaggaggtgggggaggcttcctggccctcatctttcctaggcctccttgtctcccagacaggacctgccctgccctttggaacagggcgacaaggcctatccagttccaaacccctgccgtccctgcatcgtgcttgaacgcagcacgagaaagacgggaaaagctcaccaaaccccataaaaaataaaaaataaaaagaaagccgcggctgtaaataaaggcaaatccgccactctctgaggggccgtttgtcctcccctccttggccccgtccttcccgccgccccctcccggctcccgggccccgcggcgccccggccccgagctcctccatttaatcggatttgggagaaggggaggataaatcacggcagcagctttacggtcccggaggagaggcgagccgcagacaggcacaccccggccggcgataaaaaccgccgctgaaagcccacggagcaatttcccgggaccccgagcgacgccattacaggaatgtaattttgcccggatgaggccccgagtttaattatcctcgcggaggaatttcaatgcggccaatccatcttgcaggcgggcggcagagggatttatatgggcccgttatttcacaccgatc

SEQ ID NO: 908 - DNA, 1375 bp, Homo sapiens
tcagccacggatagagtgattgcaacatacaggatcagctcaggcatcacagcgccgcctgccagggctgtggcggtatccggccggttgctccacctggcgttcgagaggagaaactacagggagcgccgactgcagaaatgaggccaactccgcggagtaagccgatccgtaacgtggactgcggtttggtctgtaccgcgtttgggatctcggacttgcgtcccctttccgagcatgcgcagtcgtcacactgccaaaacaaaactcctactcagaattcagtgttaacatacggtcgggattggggttcagtgcctaaaatgcagcaggaggaagatcttgggagtcctgctgtctgtcgcgccgggactctggcatcactggatggcaaaccggctccatgggcgaatagtcagcaaaatgccgcagctgcttctggtggcttcgccctttcccccactccccgtttcctcctttccattccggtgataaaccatgagagaagcagcatcagcgagccagaagatagggttaaatatgatccgaatccctctttcctggctcctgggacagtctaggaataacgggcacctgcgacccgctgtaaggttgcgaggtcactccaggcttgcccgagcctctgctcaggtttcaactacgcgagttgggataagcagcgccctcccctcccgcccccatgctctcctgaacgtgggttttctctcccctttcgctcgcccttcccctgatggaaggaggtgggggaggcttcctggccctcatctttcctaggcctccttgtctcccagacaggacctgccctgccctttggaacagggcgacaaggcctatccagttccaaacccctgccgtccctgcatcgtgcttgaacgcagcacgagaaagacgggaaaagctcaccaaaccccataaaaaataaaaaataaaaagaaagccgcggctgtaaataaaggcaaatccgccactctctgaggggccgtttgtcctcccctccttggccccgtccttcccgccgccccctcccggctcccgggccccgcggcgccccggccccgagctcctccatttaatcggatttgggagaaggggaggataaatcacggcagcagctttacggtcccggaggagaggcgagccgcagacaggcacaccccggccggcgataaaaaccgccgctgaaagcccacggagcaatttcccgggaccccgagcgacgccattacaggaatgtaattttgcccggatgaggccccgagtttaattatcctcgcggaggaatttcaatgcggccaatccatcttgcaggcgggcggcagagggatttatatgggcccgttatttcacaccgatc

SEQ ID NO: 909 - DNA, 555 bp, Homo sapiens
tttttttcccacttctaccatgttcaaggtttactttttaaattgaggggtgctgactagagggattggtgactttagacgatccactatctccattgctcggagcacctgaggttctggggcctaaagtctggagatttcagaataaagaaggcacaagtcaggatgagaagagaaagcagagataggaggggagagcctgggggttgtcacaatctgaaagggccagagggcgagaaaagagtgtttgcagggactgggtggaacaggtgaaaagcagcactccaggatctaactttggccagctccaaggtatcctccccctgcgagacagccaagatggcgccaggcccgcgcggttggaggtcaccggcacgcggaagagccaactctaaggctaagggatagcggaagcaagaaagggcgagaggaccagggtgggagcacgcaaggtaagcgcctcaaagcatccgcgcaaggtgaggtgtcaccgcgcgcgtgcgcagcgcacagagggctctaggtcccaaggccttacctgctcccactgcagag

SEQ ID NO: 910 - DNA, 554 bp, Homo sapiens
tttttttcccacttctaccatgttcaaggtttactttttaaattgaggggtgctgactagagggattggtgactttagacgatccactatctccattgctcggagcacctgaggttctggggcctaaagtctggagatttcagaataaagaaggcacaagtcaggatgagaagagaaagcagagataggaggggagagcctgggggttgtcacaatctgaaagggccagagggcgagaaaagagtgtttgcagggactgggtggaacaggtgaaaagcagcactccaggatctaactttggccagctccaaggtatcctccccctgcgagacatccaagatggcgccaggcccgcgcggttggaggtcaccggcacgcggaagagccaactctaaggctaagggatagcggaagcaagaaagggcgagaggaccagggtgggagcacgcaaggtaagcgcctcaaagcatccgcgcaaggtgaggtgtcccgcgcgcgtgcgcagcgcacagagggctctaggtcccaaggccttacctgctcccactgcagag

SEQ ID NO: 911 - DNA, 554 bp, Homo sapiens; identical to SEQ ID NO: 910

SEQ ID NO: 912 - DNA, 682 bp, Homo sapiens
tggactcgtgctcccttcaagtcccagctggccccaggcttcagggcttgaactgaggtggtggcatttagcaggcattgctggtagaggagggtgtcgctaatggggccacacttgggccaaactaaaaatcttgaggacaagggatactgtctataagttgtggccacgctgacattagaagaaattagttccatattcccagaccctgaatactgcatggttaaatcaaggcaggtgggcaaaaaattacagaagtccttgcttggtggttccactgggctggggctgtaggcacttttgtaggaattgtagtcaggtccaggcaccatgcggttgggcagaaacagagcagcagcttgagaagtttccaacatctccctttctttatattctctctccagcataatgttctccaactctttatcagcaaaggctcttcttttcctcatcctgtcactaactgggggaggtagagggaaggtccctcctacataagtctccgctggaatggggcgatagcctacaagaagcaaagattgcacatgaaagagattaacatctacggaataaaaatgtggaaacccagaaggtaacagcaacactacagatcagcagaacaattatttacagttccatctcactgatatttttatacagatgcaaaagtacagattaggtt

SEQ ID NO: 913 - DNA, 682 bp, Homo sapiens; identical to SEQ ID NO: 912

SEQ ID NO: 914 - DNA, 2237 bp, Homo sapiens
ggatttgtttgcttgcttgcttcaacagacatactttattgattaaaattttaatattcttcccaggccccctacgcattaagagacaagactatttatcttgtatcaatcaatgttttattattatccatgtcatcttttttcattattaaaaaatatatctatacctagagctgatgtcacttttattttctaaagatggttcattatgtacacataatagctgtagaataatccaaggagaactaggaaaaaagagaaagaaagaaagttaaaggagattagcgagtagaaaaagaaaaaaaaggcttaagaaaatagagaagcatagaaaattgaaaagagctgttaactagtcaaacacactctacagtgaacaatttaaccaggccccttcccctgataccactacaaaaaaaaataaaataaaataaaacaaaactcaaaaaaggcggggagtattccctgctctatcgaaaataactgttctgaaacattcttcccaagctctaatcattttggccggataccaaaatggttgaacaagcaatcattaaaacacaggctaagtcatcgcacgaataggagcaaactcaaatacaaagattagtgtaacataaatagaattcctggaggcataaaatacttggagtatttcatcacccccaagcactcacctctgtcatatttgtttgaagcatccattgttatatttgtgtttacatagtgacaaacccattatactcatttgcaaataaaataaaatttgaaaattaatgtttacatttctatgataagtttttgccaggaagttatttagttgaatttactattccatttagtcctcagacttcacaagttgctttgcataatctcagtttatcaatgtggccctattattataaatctgtttatccagtttgtaaccaaattcatttttaattcataagaaaccactctatggtcagaagtatacaacacatgataggacacacacaaacttcaaaacctgtccagaaccaacaaaattcagaagctacacaagaaaaaaacagaatccaaatgtctacttaaaaatttttataggacacacacaaacctgtccagaaccaacaaaattcagaagctacacaagaaaaaaacagaatccaaatgtctacttaaaaatttttgtttactttcaacctgaatttcatgaagtggcagtgattaaagcaaacattaattgtcccttatttaaatttttaaaaatttaaagagaaacggttaaaaatagtcaatatattattgaggtcaataaataaattccatacccaaatagagatgcttttaaaaatgagtaatattttaagaaaaattaatgtacccccaggctttcacgaaagtgagaacatggagacagaaagctagagatttcgcactgttcgcattcaacctccacttcgcttgctggattcgaaacctttttcagattctataaccttgactgtcaaaaaatggtaaaaatgaagtttggaataataggaattatccaagtaatccaaaaaaaaaaaaaaaagtacaatgaaaaagagcggaatctgaggttgaacttccagactaaacggctttactggttgcgagcagctgttaaactcctcacttgacttcatctattcagctcccacaactaagaaaagtggacgtggttgtgttgttttgttttgctttgtttaagttatttatttccttccaagacatctgctccaggatcacttggcagtatatctttgtacatccctcatacggggtaaatttcacatgcactccacattaaccgattaaccactaagcagacaaccaaataatagggattcttcaactggtggtgacagaaacctcaggaggtatgtgagattcattttcccaggtggcggtttccttcctagaagaaaactttctggttcccgggccatgctaatcttctccgtacgggttcagttttagcgtacgggctcagcgaacacctaaacaaaacctttctaataaaaagtactttccctttagatagctctttcacagattaataaacacactttgtgctgattaatgagagtcactcaactctgtttaaaaggctgaaggataattttgttgctttaccttctaaaatgcttttggccagcaaactgggggctctgacttgcctctggtacacagctttgcgctcgaaattattctgtttcccggaaagcccc

SEQ ID NO: 915 - DNA, 689 bp, Homo sapiens
tttgcttcggcaaatattgggtctttgagaagacagtgtcaattttattgctttttgaaatgctgtgtaaagtgtggtacttaacaatttgcacattgggcaatttccatctgtaagtttaaatatatgtgataagaaaaagtacatgcatattaggaatatataaaatttttcaaaatcatcatctttacattagaaatttctttacacaaacatcttaacttttaaaaaaagtagcaaatggctataatgctctaagactgcagaaaatccagctttctgtttaagcagcctttcactgagagacacgagtgatggcagatgaaggcctcttaagaatagactcaacagaaaatgacagtggttcattcaccgagagttttgttccaacttgtttggctacaaaaaggtcttttgcacatctatctattgtaaatgtgtacttctggttgtccttaactaaacactctctgtgtttcttaggggtctcttcaaaggcctctttgacaaatggtgttttcaactcaggacccgatttgtcagtaagtgtttgctggaataatgagtggaatggattatgtctaagtggcagagggtgcctggtttttctttgctgatcttcgttaagacatgcccttgagctgccagggagtccgtgtcaacaatgggagagaaattccgtcggggtg

SEQ ID NO: 916 - DNA, 689 bp, Homo sapiens
tttgcttcggcaaatattgggtctttgagaagacagtgtcaattttattgctttttgaaatgctgtgtaaagtgtggtacttaacaatttgcacattgggcaatttccatctgtaagtttaaatatatgtgataagaaaaagtacatgcatattaggaatatataaaatttttcaaaatcatcatctttacattagaaatttctttacacaaacatcttaacttttaaaaaaagtagcaaatggctataatgctctaagactgcagaaaatccagctttctgtttaagcagcctttcactgagagacacgagtgatggcagatgaaggcctcttaagaatagactcaacagaaaatgacagtggttcattcaccgagagttttgttccaacttgtttggctacaaaaaggtcttttgcacatctatctattgtaaatgtgtacttctggttgtccttaactaaacactctctgtgttcttaggggtctcttcaaaggcctctttgacaaatggtgttttcaactcaggacccgatttgtcagtaagtgtttgctggaataatgagtggaatggattatgtctaagtggcagagggtgcctggtgttttctttgctgatcttcgttaagacatgcccttgagctgccagggagtccgtgtcaacaatgggagagaaattccgtcggggtg

SEQ ID NO: 917 - DNA, 2237 bp, Homo sapiens; identical to SEQ ID NO: 914

SEQ ID NO: 918 - DNA, 1337 bp, Homo sapiens
agccgcgcctatcatttccatatcgcctgtgcccgttctctgctgcagtggcagagctcagtagctgccaccgagaccagctggcccaagaagccgaaaatattaactctctggcccttcccacttcaaagcatcattcataaaacttcagtgtgatgtaggagaagataatcacgtcacattcatggcaagaaaaaatactcagatccaagtagactggcagcaaccaaacatgctgatgtgtggggctgttttctgtattttcttcagtggtctggcagttgtcccattttctagatgagaaaactgatcctcagaaaggtctccaggtgagtaatcagcgaggccagcattcaccattgactgcctcccttacagaaaaggataataacaacatttcagtttagtatgacctgatcctgtaggtggctttactgcaactgagagttgaactgaaggatctgcatttctttctttgacatctgaaaataaaggaaataaaactactgatattgaaagtaataaaaaatgaatatgaaatgatttttactgtcagttttttttgttttgttttgttttgttttttcacagagtcttgctgtgtcacccaggctggagtgcagtggcatggtctctgctcaccgcaagctccacctcccggattcacgccattctcctgcctcagcctcccgagtggctgagactacaagcgcccgccaccatgcctggctaattttgtttttgtatttttagtagacatggggtttcaccgtgttagcctggatggtctcgatctcccgacctcgtgatccgcccgcctcggcctcccaaagtgctgggattacaggcgtgagccaccatgcctggcccggttgttgtagtataaagtgcatgtcagtggcatgaagtggatgtgtaattcttcccctagcaccctcccagtgaggcaagccggcattgccattaagctgtttctgtggtttttctagcacgacttttatggtatggcaagtctcaaaaaaagaacttgtcgggaaaccatttctgaccattgctttcagcttaattaaccagtattagcaagaatgtaaaaggacagatcaggtgaactatcttaacaaataccaaaagtaaatgtctctatatggagggtaagatgtagacaaactcagacacaataaagaaatttaaagaggtgagtgggcagggcacagtggctcatgcctgtaatcccagcactttgggagactgaggtgggtggattggataaggctgggagtttgagaccagcctaggcaagatagtgagacccccatctctgaaaaaaagaaaaaaaa

SEQ ID NO: 919 - DNA, 1338 bp, Homo sapiens
agccgcgcctatcatttccatatcgcctgtgcccgttctctgctgcagtggcagagctcagtagctgccaccgagaccagctggcccaagaagccgaaaatattaactctctggcccttcccacttcaaagcatcattcataaaacttcagtgtgatgtaggagaagataatcacgtcacattcatggcaagaaaaaatactcagatccaagtagactggcagcaaccaaacatgctgatgtgtggggctgttttctgtattttcttcagtggtctggcagttgtcccattttctagatgagaaaactgatcctcagaaaggtctccaggtgagtaatcagcgaggccagcattcaccattgactgcctcccttacagaaaaggataataacaacatttcagtttagtatgacctgatcctgtaggtggctttactgcaactgagagttgaactgaaggatctgcatttctttctttgacatctgaaaataaaggaaataaaactactgatattgaaagtaataaaaaatgaaaatgaaatgatttttactgtcagttttttttgttttgttttgttttgttttttcacagagtcttgctgtgtcacccaggctggagtgcagtggcatggtctctgctcaccgcaagctccacctcccggattcacgccattctcctgcctcagcctcccgagtggctgagactacaagcgcccgccaccatgcctggctaatgttgtttttgtatttttagtagacatggggtttcaccgtgttagcctggatggtctcgatctcccgacctcagtgatccgcccgcctcggcctcccaaagtgctgggattacaggcgtgagccaccatgcctggcccggttgttgtagtataaagtgcatgtcagtggcatgaagtggatgtgtaattcttcccctagcaccctcccagtgaggcaagccggcattgccattaagctgtttctgtggtttttctagcacgacttttatggtatggcaagtctcaaaaaaagaacttgtcgggaaaccatttctgaccattgctttctgcttaattaaccagtattagcaagaatgtaaaaggacagatcaggtgaactatcttaacaaataccaaaagtaaatgtctctatatggagggtaagatgtagacaaactcagacacaataaagaaatttaaagaggggagtgggcagggcacagtggctcatgcctgtaatcccagcactttgggagactgaggtgggtggattggataaggctgggagtttgagaccagcctaggcaagatagtgagacccccatctctgaaaaaaagaaaaaaaa

SEQ ID NO: 920 - DNA, 126 bp, Homo sapiens
tttttttgtatttttagtagagacagggtttcgccatgttggccaggctggtctgaaactcctgacctcaagtgatccacccacctcagcctcccgaagtgctgggattacaggcgtgagccacca

SEQ ID NO: 921 - DNA, 104 bp, Homo sapiens
aggctgaggcaggagaatagcttgaacccaggagttggaggttgcagtgagccaagattgcaccattgcactccagcctgggcaacagagcaagactttgtctc

SEQ ID NO: 922 - DNA, 466 bp, Homo sapiens
ccccagcccaccgcccccacccaaagtgacatttgcttatgtgactctgactcacattatagttagaggaccgtgggttccaaaggtggttctcagccctgactggtcagtcaccagagtctcctctcagtgatcattcagtctatgcataaacacttccagtgacaggaagctctcagcctcccacagaggctcacgccaactttggaaatgctcctacacttaaatggttgttggatttgtttataaacctaccttcttgcaactttcacccacccatgctgtttctacttctgtggtgaatgatgcctctcacacatgtcagcatatcgggcttcctgcattatctcttcacccatagatccttaaaaccaaaagccttttgacgttgctttagaaaggaagtaaatcctaaggagctttgatgttgaagcaccccttagtcaggaaagctgaaaaatgtcag

SEQ ID NO: 923 - DNA, 676 bp, Homo sapiens
tgtcaccattttgaaactcaaatactcaggttgcctttacaaccgaaagatagtagcacactactaccccctggtggcagcatgcccaaggtgtaggatcaatacctgggaagtaaaataccactaatgtatatgcaagctctaaaagcaaaggcataactatttaaagatctaaactcagcttcaatttgtggtctagacaactaatctatattaaattcaatgtgacacatgtattacaaaattcatctacattattgcaaataaaatgtcaaaaataacataatcccattaaaaagtaggcaaaggacataaataggcatttttcaaaagaagacaaatggctaagaatcaaatgaaaaaagttcatcactaatcagagaaatgcaaattaaaaccacaatgatatatcattttataccagtcagaatagctattattaaaaagataaaaaataagatgttggcggagtgctgagtaaagggaacacttatacattgttgctaggaatgtgattggtacaagctctatggaaaacagcatggatatttctcaaagaactaaaaatagaactactaatccatctggcaatcctactattggctatatacccaagaaaaagaaatcatatccaaaagatacctgcgctcatatgtttattgcaacactattcaca

SEQ ID NO: 924 - DNA, 2485 bp, Homo sapiens
atttttcatgtcacataattttggagtatgtcatggacatttgaatattttgttacaaaactggatgctgttaaaatcctctggaaaatatttttggttttttggtttcactttagcgggcagttaacctggttaggttcagactgcctctgtgggctgtggatccagtttgaacttacttttcaaaaccttcgtattgctgttcaggtcccaggtgtgccatccatgccattgtgcagttctcaacgcctttcctctgccgccttgggtcagttcacacatgggcatgttggtggtaaacttgagattgtatacacaaatttagaggacgtttcttctctccgtgacttcccttgtacacaagctcccaagagtttcttttcgtggttctttggtgagaaaactggaattttagcttctttgtgcttttcatacgttttctgtagaggggctcatttcctgaacaaaatggagagagagaaaagttagagaaaaaaataaaatgaattccctcttccatactcttccgatcatcgtctttttcctagttcttttgtcagaagaactctcttttagagtttaggagacagctaccagccacaggtgtgcagactcaggattggggcttgctttgaggcagagctgagagagaagaaaaattaccagatatccacccctccccattgtccctctcccattcatcatcttttctagttctctagccagaaggagtttctcttggaacttttctctgtcttcactcactgcacagttaatgagatttgggctgtcctcaagtctaagctgacatatgtgggagaaaaaaaccaggaaactcactactgttttgagttttgatttctctcgccagtctgcttgcttcaaattacttttcagagtccttgtatatttgctttatgtattctttccaggatttttagtaataatcaatggacaagatagggtggagtgtgctttctccatcttagctagaactgggaccccgtcccccactcgtaaaatataaataatgacttagcatggcacattaggtgggcattagagacaccagggaagcgattacaaatataatgcccaggttgtatctccagataattaaaaatctttcaggagtaggatccagaaaactatatttaaaagttctctaggttcttgatatactatgtaggttgtggtctgaggaccactacatggggatcatttggaaacttgttagaaatgtagactcaggttccattccagacctgctgaattggaacaagatccccagatggtgcctacgcacagtaaaatttgagcagcactgccctagcatgattctagtgtgcagtcaatgttgaggaccactgtcttagaggattgcgtaaaagcaaatgacgtgtatataaatttagattgtaatattctctgagtataaactcattaggtgcaagctgagctcaccctccatgttttctgtgttcctggttaaagtaagttacctttgatgaaaaccacaggttcatctttgacttcaaatcagatttgttgctattgaagctaattggatcccagctcagctttgtggcttggattcacaccatataaaatcttcaacagacattcattcctttgttcagaacacacaaccttctaacgtgaacctccaattttctaaattcattctttttctacttcacctgaaaccacagatccatggcacttagtttctctgtaacagcagctctaccatggtgtccagaaattttagcccctactatcaagaacaaaacatccttgtacatgtttatacatctttttgagtaggagttttccaccagttgcagggattccctgagtctagagtaatgccacaatgctgctcccttttactcctttctaagcatttctgtcagggagaagacttagattcagttgttcactttaacattttccttagatactctcttagaaaagttgtattctgcgcacttctgttatgaagggagtaagggattgctgagatttgttaagttaccaaactagtcttgatagatgtataattattacatatccaccatcacttcatttagctgggcaagtattatcagtttggttcatgttagctaattaggtcactggtttgttcctaggacagtgttgggctggtcatataagttagaagcacctgggagctgggcatggtggctcacgcctgtaatcccagcactttgggaggccgagcgggcggatcatgaggtcaggagatcgagatcatcctggctgacagagtgaaaccccgtctctactaaaaatacaaaaaaaattagctgggcatggtggtgggcacctgtagtcccagctacttgggaggctgaggcaggagaatggtgtgaacctgggaggcggagcttgcagtgagctgagatggcgccactgcactccagcctgggcgacagagcgagaactccatctcaaaaaaaaa

SEQ ID NO: 925 - DNA, 2689 bp, Homo sapiens
atttttcatgtcacataattttggagtatgtcatggacatttgaatattttgttacaaaactggatgctgttaaaatcctctggaaaatatttttggttttttggtttcactttagcgggcagttaacctggttaggttcagactgcctctgtgggctgtggatccagtttgaacttacttttcaaaaccttcgtattgctgttcaggtcccaggtgtgccatccatgccattgtgcagttctcaacgcctttcctctgccgccttgggtcagttcacacatgggcatgttggtggtaaacttgagattgtatacacaaatttagaggacgtttcttctctccgtgacttcccttgtacacaagctcccaagagtttcttttcgtggttctttggtgagaaaactggaattttagcttctttgtgcttttcatacgttttctgtagaggggctcatttcctgaacaaaatggagagagagaaaagttagagaaaaaaataaaatgaattccctcttccatactcttccgatcatcgtctttttcctagttcttttgtcagaagaactctcttttagagtttaggagacagctaccagccacaggtgtgcagactcaggattggggcttgctttgaggcagagctgagagagaagaaaaattaccagatatccacccctccccattgtccctctcccattcatcatcttttctagttctctagccagaaggagtttctcttggaacttttctctgtcttcactcactgcacagttaatgagatttgggctgtcctcaagtctaagctgacatatgtgggagaaaaaaaccaggaaactcactactgttttgagttttgatttctctcgccagtctgcttgcttcaaattacttttcagagtccttgtatatttgctttatgtattctttccaggatttttagtaataatcaatggacaagatagggtggagtgtgctttctccatcttagctagaactgggaccccgtcccccactcgtaaaatataaataatgacttagcatggcacattaggtgggcattagagacaccagggaagcgattcaaatataaatgcccaggtgtatctccagataattaaaaatctttcaggagtaggatccagaaaactatatttaaaagttctctaggttcttgatatactatgtaggttgtggtctgaggaccactacatggggatcatttggaaacttgttagaaatgtagactcaggttccattccagacctgctgaattggaacaagatccccagatggtgcctacgcacagtaaaatttgagcagcactgccctagcatgattctagtgtgcagtcaatgttgaggaccactgtcttagaggattgcgtaaaagcaaatgacgtgtatataaatttagattgtaatattctctgagtataaactcattaggtgcaagctgagctcaccctccatgttttctgtgttcctggttaaagtaagttacctttgatgaaaaccacaggttcatctttgacttcaaatcagatttgttgctattgaagctaattggatcccagctcagctttgtggcttggattcacaccatataaaatcttcaacagacattcattcctttgttcagaacacacaaccttctaacgtgaacctccaattttctaaattcattctttttctacttcacctgaaaccacagatccatggcacttagtttctctgtaacagcagctctaccatggtgtccagaaattttagcccctactatcaagaacaaaacatccttgtacatgtttatacatctttttgagtaggagttttccaccagttgcagggattccctgagtctagagtaatgccacaatgctgctcccttttactcctttctaagcatttctgtcagggagaagacttagattcagttgttcactttaacattttccttagatactctcttagaaaagttgtattctgcgcacttctgttatgaagggagtaagggattgctgagatttgttaagttaccaaactagtcttgatagatgtataattattacatatccaccatcacttcatttagctgggcaagtattatcagtttggttcatgttagctaattaggtcactggtttgttcctaggacagtgttgggctggtcatataagttagaagcacctgggagctgggcatggtggctcacgcctgtaatcccagcactttgggaggccgagcgggcggatcatgaggtcaggagatcgagatcatcctggctgacagagtgaaaccccgtctctactaaaaatacaaaaaaaattagctgggcatggtggtgggcacctgtagtcccagctacttgggaggctgaggcaggagaatggtgtgaacctgggaggcggagcttgcagtgagctgagatggcgccactgcactccagcctgggcgacagagcgagactccatctcaaaaaaaaaaaaaaaaaaaacacacctggggtgctcataataaaaaaaacaaaaacccagatatttatcccagttttgattccaaagatcaggtaccagtactttctttttggagacagggtcttgctctgtcacccaggctggagtgcagtgtaccatcatggctcattgcaaccttgacctcctgagttcaagcagtcctctcacctcagcct

SEQ ID NO: 926 - DNA, 235 bp, Homo sapiens
gtcagcaggagctgggtcggtggctggatgctgcagcagcagggactcagcgcctgggagggctcctggggcagggagagaagcagagatgcaacatttttaaaatttcacaaagcatccggctgcacccaggtccctggaacaggagacaaacagaattaatgttttataccttcgggtataggtttgagttttttccccctcatgccaagtatttaaaacctctagaaaccca

SEQ ID NO: 927 - DNA, 272 bp, Homo sapiens
gagtccagagaaacagggagtgagacccctttgggtcctggcccttgcttttattatagtttgagcattttgtcctccttcccacagatagagcagatgtcctcaaagatgctctgtatttcagccttcagggcagctaagaagccatgagtgacttaggctgccctggccatgaacaccggagccagactggctggccagactgattcccgcatcccccatctgtgttttgaggggaaatctcaggttttgaggaatgaacatggcagcta
